(19) United States
(12) Patent Application Publication
(10) Pub. No.: US 2025/0002886 A1
(43) Pub. Date: Jan. 2, 2025

(54) ENGINEERED AND CHIMERIC NUCLEASES

(71) Applicant: Metagenomi, Inc., Emeryville, CA (US)

(72) Inventors: Brian C. Thomas, Berkeley, CA (US); Alan Brooks, Clayton, CA (US); Christopher Brown, Albany, CA (US); Cristina Noel Butterfield, Oakland, CA (US); Daniela S.A. Goltsman, Oakland, CA (US); Jyun-Liang Lin, Richmond, CA (US); Isabel Nocedal, Oakland, CA (US); Morayma Temoche-Diaz, Emeryville, CA (US)

(21) Appl. No.: 18/885,463

(22) Filed: Sep. 13, 2024

Related U.S. Application Data
(63) Continuation of application No. PCT/US2023/064351, filed on Mar. 14, 2023.
(60) Provisional application No. 63/482,294, filed on Jan. 30, 2023.
(60) Provisional application No. 63/392,814, filed on Jul. 27, 2022.
(60) Provisional application No. 63/335,542, filed on Apr. 27, 2022.
(60) Provisional application No. 63/319,725, filed on Mar. 14, 2022.

(51) Int. Cl. C12N 9/22; C12N 15/11

(52) U.S. Cl. CPC C12N 9/22; C12N 15/111; C12N 2310/20

(57) ABSTRACT

Disclosed herein are engineered nucleases and nuclease systems, including chimeric nucleases and chimeric nuclease systems. Engineered and chimeric nucleases disclosed herein include nucleic acid guided nuclease. Additionally disclosed herein are methods of generating engineered nucleases and methods of using the same.

### CROSS-REFERENCE

[0001] This application is a continuation of International Application No. PCT/US2023/064351, filed Mar. 14, 2023, which claims the benefit of and priority to U.S. Provisional Patent Application No. 63/319,725, filed Mar. 14, 2022, U.S. Provisional Patent Application No. 63/335,542, filed Apr. 27, 2022, U.S. Provisional Patent Application No. 63/392,814, filed Jul. 27, 2022, and U.S. Provisional Patent Application No. 63/482,294, filed Jan. 30, 2023, each of which is incorporated by reference in its entirety herein.

### SEQUENCE LISTING

[0002] The contents of the electronic sequence listing (MTG-010WO_SL.xml; Size: 5,041,672 bytes; and Date of Creation: Jul. 14, 2023) is herein incorporated by reference in its entirety.

### BACKGROUND

[0003] Cas enzymes along with their associated Clustered Regularly Interspaced Short Palindromic Repeats (CRISPR) guide ribonucleic acids (RNAs) appear to be a pervasive (˜45% of bacteria, ˜84% of archaea) component of prokaryotic immune systems, serving to protect such microorganisms against non-self-nucleic acids, such as infectious viruses and plasmids by CRISPR-RNA guided nucleic acid cleavage. While the deoxyribonucleic acid (DNA) elements encoding CRISPR RNA elements may be relatively conserved in structure and length, their CRISPR-associated (Cas) proteins are highly diverse, containing a wide variety of nucleic acid-interacting domains. While CRISPR DNA elements have been observed as early as 1987, the programmable endonuclease cleavage ability of CRISPR/Cas complexes has only been recognized relatively recently, leading to the use of recombinant CRISPR/Cas systems in diverse DNA manipulation and gene editing applications.

### SEQUENCE LISTING

[0004] The instant application contains a Sequence Listing which has been submitted electronically in XML format and is hereby incorporated by reference in its entirety. Said XML copy, created on Mar. 14, 2023, is named MTG-010WO_SL.xml and is 4,575,581 bytes in size.

### SUMMARY

[0005] In some aspects, the present disclosure provides for a method of disrupting a VCP locus in a cell, comprising introducing to the cell: (a) a class 2, type II Cas endonuclease; and (b) an engineered guide RNA, wherein the engineered guide RNA is configured to form a complex with the endonuclease and the engineered guide RNA comprises a targeting sequence configured to hybridize to a region of the VCP locus, wherein the engineered guide RNA is configured to hybridize to or comprises a targeting sequence having at least 80% identity to SEQ ID NOs: 739-754 or 763-770; or wherein the engineered guide RNA comprises a sequence having at least 80% identity to any one of SEQ ID NOs: 723-738 or 755-762. In some embodiments, the class 2, type II Cas endonuclease comprises any of the engineered nucleases described herein. In some embodiments, the class 2, type II Cas endonuclease comprises a fusion endonuclease having at least 55% identity to SEQ ID NO: 10 or a variant thereof. In some embodiments, the engineered guide RNA comprises a sequence at least 80%, at least 81%, at least 82%, at least 83%, at least 84%, at least 85%, at least 86%, at least 87%, at least 88%, at least 89%, at least 90%, at least 91%, at least 92%, at least 93%, at least 94%, at least 95%, at least 96%, at least 97%, at least 98%, or at least 99% sequence identity to non-degenerate nucleotides of SEQ ID NO: 722 or SEQ ID NO: 863. In some embodiments, the engineered guide RNA is complementary to or comprises a sequence having at least 80%, at least 81%, at least 82%, at least 83%, at least 84%, at least 85%, at least 86%, at least 87%, at least 88%, at least 89%, at least 90%, at least 91%, at least 92%, at least 93%, at least 94%, at least 95%, at least 96%, at least 97%, at least 98%, or at least 99% sequence identity to any one of SEQ ID NOs: 743-745, 749-752, 754, or 769. In some embodiments, the engineered guide RNA comprises a nucleotide sequence of any one of the guide RNAs from Table 22B, comprising the chemical modifications recited in Table 22B.

[0006] In some cases, the present disclosure provides for a fusion endonuclease comprising: (a) an N-terminal sequence comprising at least part of a RuvC-I domain, a REC domain, a RuvC-II domain, an HNH domain, or a RuvC-III domain of an endonuclease having at least 55%, at least 80%, at least 81%, at least 82%, at least 83%, at least 84%, at least 85%, at least 86%, at least 87%, at least 88%, at least 89%, at least 90%, at least 91%, at least 92%, at least 93%, at least 94%, at least 95%, at least 96%, at least 97%, at least 98%, or at least 99% sequence identity to SEQ ID NO: 696 or a variant thereof; and (b) a C-terminal sequence comprising WED or PI domains of an endonuclease having at least 55%, at least 80%, at least 81%, at least 82%, at least 83%, at least 84%, at least 85%, at least 86%, at least 87%, at least 88%, at least 89%, at least 90%, at least 91%, at least 92%, at least 93%, at least 94%, at least 95%, at least 96%, at least 97%, at least 98%, or at least 99% sequence identity to MG3-1, MG3-2, MG3-3, MG3-4, MG3-5, MG3-6, MG3-7, MG3-8, MG3-18, MG3-22, MG3-24, MG3-30, MG3-42, MG3-78, MG3-89, MG3-90, MG3-91, MG3-92, MG3-93, MG3-94, MG3-95, MG3-96, MG3-101, MG3-103, MG3-104, MG150-1, MG150-2, MG150-3, MG150-4, MG150-5, MG150-6, MG150-7, MG150-8, MG150-9, MG150-10, MG15-1, MG15-54, MG15-66, MG15-94, MG15-115, MG15-135, MG15-146, MG15-164, MG15-166, MG15-171, MG15-172, MG15-174, MG15-177, MG15-184, MG15-187, MG15-191, MG15-193, MG15-195, MG15-217, MG15-218, or MG15-219, or variants thereof, wherein the N-terminal sequence and the C-terminal sequence do not naturally occur together in a same reading frame. In some embodiments, the N-terminal sequence and the C-terminal sequence are derived from different organisms. In some embodiments, the fusion endonuclease comprises a sequence having at least 55%, at least 80%, at least 81%, at least 82%, at least 83%, at least 84%, at least 85%, at least 86%, at least 87%, at least 88%, at least 89%, at least 90%, at least 91%, at least 92%, at least 93%, at least 94%, at least 95%, at least 96%, at least 97%, at least 98%, or at least 99% sequence identity to any one of SEQ ID NOs: 771-862, or a variant thereof. In some embodiments, the fusion endonuclease is configured to be selective for a PAM that is not nnRGGnT. In some embodiments, the fusion endonuclease is configured to be selective for a PAM that comprises any one of SEQ ID NOs: 865-919. In some embodiments, the fusion endonuclease comprises a WED domain from an endonuclease with at least 55% sequence identity to MG3-8, and a PI domain from an endonuclease with at least 55% sequence identity to at least one of MG3-1, MG3-2, MG3-3, MG3-4, MG3-5, MG3-6, MG3-7, MG3-8, MG3-18, MG3-22, MG3-24, MG3-30, MG3-42, MG3-78, MG3-89, MG3-90, MG3-91, MG3-92, MG3-93, MG3-94, MG3-95, MG3-96, MG3-101, MG3-103, MG3-104, MG150-1, MG150-2, MG150-3, MG150-4, MG150-5, MG150-6, MG150-7, MG150-8, MG150-9, MG150-10, MG15-1, MG15-54, MG15-66, MG15-94, MG15-115, MG15-135, MG15-146, MG15-164, MG15-166, MG15-171, MG15-172, MG15-174, MG15-177, MG15-184, MG15-187, MG15-191, MG15-193, MG15-195, MG15-217, MG15-218, or MG15-219, or variants thereof.

[0007] In some aspects, the present disclosure provides for an endonuclease comprising an engineered amino acid sequence having at least 55%, at least 80%, at least 81%, at least 82%, at least 83%, at least 84%, at least 85%, at least 86%, at least 87%, at least 88%, at least 89%, at least 90%, at least 91%, at least 92%, at least 93%, at least 94%, at least 95%, at least 96%, at least 97%, at least 98%, or at least 99% sequence identity to any one of SEQ ID NOs: 771-862, or a variant thereof. In some embodiments, the endonuclease comprises an engineered amino acid sequence having at least 55%, at least 80%, at least 81%, at least 82%, at least 83%, at least 84%, at least 85%, at least 86%, at least 87%, at least 88%, at least 89%, at least 90%, at least 91%, at least 92%, at least 93%, at least 94%, at least 95%, at least 96%, at least 97%, at least 98%, or at least 99% sequence identity to any one of SEQ ID NOs: 809-823, 827, 829-830, 832, 834, or 838-839.

[0008] In some aspects, the present disclosure provides for an engineered nuclease system, comprising: (a) any of the endonucleases described herein; and (b) an engineered guide ribonucleic structure configured to form a complex with the endonuclease comprising: a guide ribonucleic acid configured to hybridize to a target deoxyribonucleic acid sequence; wherein the guide ribonucleic acid sequence is configured to bind to the endonuclease. In some embodiments, the guide ribonucleic acid further comprises a tracer ribonucleic acid sequence configured to bind the endonuclease. In some embodiments, the endonuclease is derived from an uncultivated microorganism. In some embodiments, the endonuclease is not a Cas9 endonuclease, a Cas14 endonuclease, a Cas12a endonuclease, a Cas12b endonuclease, a Cas 12c endonuclease, a Cas12d endonuclease, a Cas12e endonuclease, a Cas13a endonuclease, a Cas13b endonuclease, a Cas13c endonuclease, or a Cas13d endonuclease. In some embodiments, the endonuclease has less than 86% identity to a SpyCas9 endonuclease. In some embodiments, the endonuclease comprises a sequence having at least 55%, at least 80%, at least 81%, at least 82%, at least 83%, at least 84%, at least 85%, at least 86%, at least 87%, at least 88%, at least 89%, at least 90%, at least 91%, at least 92%, at least 93%, at least 94%, at least 95%, at least 96%, at least 97%, at least 98%, or at least 99% sequence identity to any one of SEQ ID NOs: 771-862, or a variant thereof. In some embodiments, the guide ribonucleic acid sequence comprises a sequence having at least 80%, at least 81%, at least 82%, at least 83%, at least 84%, at least 85%, at least 86%, at least 87%, at least 88%, at least 89%, at least 90%, at least 91%, at least 92%, at least 93%, at least 94%, at least 95%, at least 96%, at least 97%, at least 98%, or at least 99% sequence identity to non-degenerate nucleotides of SEQ ID NO: 722 or SEQ ID NO: 863.

[0009] In some aspects, the present disclosure provides for a method of disrupting a TRAC locus in a cell, comprising introducing to the cell: (a) a class 2, type II Cas endonuclease; and (b) an engineered guide RNA, wherein the engineered guide RNA is configured to form a complex with the endonuclease and the engineered guide RNA comprises a targeting sequence configured to hybridize to a region of the TRAC locus, wherein the engineered guide RNA is configured to hybridize to or comprises a targeting sequence having at least 80%, at least 81%, at least 82%, at least 83%, at least 84%, at least 85%, at least 86%, at least 87%, at least 88%, at least 89%, at least 90%, at least 91%, at least 92%, at least 93%, at least 94%, at least 95%, at least 96%, at least 97%, at least 98%, or at least 99% sequence identity to SEQ ID NOs: 925-927, 992-1011, 1184-1279, or 1321-1361; or wherein the engineered guide RNA comprises a sequence having at least 80%, at least 81%, at least 82%, at least 83%, at least 84%, at least 85%, at least 86%, at least 87%, at least 88%, at least 89%, at least 90%, at least 91%, at least 92%, at least 93%, at least 94%, at least 95%, at least 96%, at least 97%, at least 98%, or at least 99% sequence identity to any one of SEQ ID NOs: 922-924, 972-991, 1088-1183, or 1280-1320. In some embodiments, the class 2, type II Cas endonuclease comprises the fusion endonuclease described herein or comprises a sequence having at least at least 80%, at least 81%, at least 82%, at least 83%, at least 84%, at least 85%, at least 86%, at least 87%, at least 88%, at least 89%, at least 90%, at least 91%, at least 92%, at least 93%, at least 94%, at least 95%, at least 96%, at least 97%, at least 98%, or at least 99% sequence identity to SEQ ID NO: 771. In some embodiments, the engineered guide RNA comprises a sequence with at least 80%, at least 81%, at least 82%, at least 83%, at least 84%, at least 85%, at least 86%, at least 87%, at least 88%, at least 89%, at least 90%, at least 91%, at least 92%, at least 93%, at least 94%, at least 95%, at least 96%, at least 97%, at least 98%, or at least 99% sequence identity to non-degenerate nucleotides of SEQ ID NO: 722 or SEQ ID NO: 863.

[0010] In some aspects, the present disclosure provides for a method of disrupting an AAVS1 locus in a cell, comprising introducing to the cell: (a) a class 2, type II Cas endonuclease; and (b) an engineered guide RNA, wherein the engineered guide RNA is configured to form a complex with the endonuclease and the engineered guide RNA comprises a targeting sequence configured to hybridize to a region of the AAVS1 locus, wherein the engineered guide RNA is configured to hybridize to or comprises a targeting sequence having at least 80%, at least 81%, at least 82%, at least 83%, at least 84%, at least 85%, at least 86%, at least 87%, at least 88%, at least 89%, at least 90%, at least 91%, at least 92%, at least 93%, at least 94%, at least 95%, at least 96%, at least 97%, at least 98%, or at least 99% sequence identity to SEQ ID NOs: 950-971 or 1050-1087; or wherein the engineered guide RNA comprises a sequence having at least 80%, at least 81%, at least 82%, at least 83%, at least 84%, at least 85%, at least 86%, at least 87%, at least 88%, at least 89%, at least 90%, at least 91%, at least 92%, at least 93%, at least 94%, at least 95%, at least 96%, at least 97%, at least 98%, or at least 99% sequence identity to any one of SEQ ID NOs: 928-949 or 1012-1049. In some embodiments, the class 2, type II Cas endonuclease comprises the fusion endonuclease described herein or comprises a sequence having at least at least 80%, at least 81%, at least 82%, at least 83%, at least 84%, at least 85%, at least 86%, at least 87%, at least 88%, at least 89%, at least 90%, at least 91%, at least 92%, at least 93%, at least 94%, at least 95%, at least 96%, at least 97%, at least 98%, or at least 99% sequence identity to SEQ ID NO: 771. In some embodiments, the engineered guide RNA comprises a sequence with at least 80%, at least 81%, at least 82%, at least 83%, at least 84%, at least 85%, at least 86%, at least 87%, at least 88%, at least 89%, at least 90%, at least 91%, at least 92%, at least 93%, at least 94%, at least 95%, at least 96%, at least 97%, at least 98%, or at least 99% sequence identity to non-degenerate nucleotides of SEQ ID NO: 722 or SEQ ID NO: 863.

[0011] In some aspects, the present disclosure provides for a method of disrupting an PCSK9 locus in a cell, comprising introducing to the cell: (a) a class 2, type II Cas endonuclease; and (b) an engineered guide RNA, wherein the engineered guide RNA is configured to form a complex with the endonuclease and the engineered guide RNA comprises a targeting sequence configured to hybridize to a region of the PCSK9 locus, wherein the engineered guide RNA is configured to hybridize to or comprises a targeting sequence having at least 80%, at least 81%, at least 82%, at least 83%, at least 84%, at least 85%, at least 86%, at least 87%, at least 88%, at least 89%, at least 90%, at least 91%, at least 92%, at least 93%, at least 94%, at least 95%, at least 96%, at least 97%, at least 98%, or at least 99% sequence identity to SEQ ID NOs: 1377-1391; or wherein the engineered guide RNA comprises a sequence having at least 80% identity to any one of SEQ ID NOs: 1362-1376. In some embodiments, the class 2, type II Cas endonuclease comprises the fusion endonuclease described herein. In some embodiments, the class 2, type II Cas endonuclease comprises a fusion endonuclease having at least 55%, at least 80%, at least 81%, at least 82%, at least 83%, at least 84%, at least 85%, at least 86%, at least 87%, at least 88%, at least 89%, at least 90%, at least 91%, at least 92%, at least 93%, at least 94%, at least 95%, at least 96%, at least 97%, at least 98%, or at least 99% sequence identity to SEQ ID NO: 10 or a variant thereof. In some embodiments, the engineered guide RNA comprises a sequence with at least 80%, at least 81%, at least 82%, at least 83%, at least 84%, at least 85%, at least 86%, at least 87%, at least 88%, at least 89%, at least 90%, at least 91%, at least 92%, at least 93%, at least 94%, at least 95%, at least 96%, at least 97%, at least 98%, or at least 99% sequence identity to non-degenerate nucleotides of SEQ ID NO: 722 or SEQ ID NO: 863.

[0012] In some aspects, the present disclosure provides for a method of disrupting an ANGPTL3 locus in a cell, comprising introducing to the cell: (a) a class 2, type II Cas endonuclease; and (b) an engineered guide RNA, wherein the engineered guide RNA is configured to form a complex with the endonuclease and the engineered guide RNA comprises a targeting sequence configured to hybridize to a region of the ANGPTL3 locus, wherein the engineered guide RNA is configured to hybridize to or comprises a targeting sequence having at least 80%, at least 81%, at least 82%, at least 83%, at least 84%, at least 85%, at least 86%, at least 87%, at least 88%, at least 89%, at least 90%, at least 91%, at least 92%, at least 93%, at least 94%, at least 95%, at least 96%, at least 97%, at least 98%, or at least 99% sequence identity to SEQ ID NOs: 1490-1587; or wherein the engineered guide RNA comprises a sequence having at least 80%, at least 81%, at least 82%, at least 83%, at least 84%, at least 85%, at least 86%, at least 87%, at least 88%, at least 89%, at least 90%, at least 91%, at least 92%, at least 93%, at least 94%, at least 95%, at least 96%, at least 97%, at least 98%, or at least 99% sequence identity to any one of SEQ ID NOs: 1392-1489. In some embodiments, the class 2, type II Cas endonuclease comprises the fusion endonuclease described herein. In some embodiments, the class 2, type II Cas endonuclease comprises a fusion endonuclease having at least 55%, at least 80%, at least 81%, at least 82%, at least 83%, at least 84%, at least 85%, at least 86%, at least 87%, at least 88%, at least 89%, at least 90%, at least 91%, at least 92%, at least 93%, at least 94%, at least 95%, at least 96%, at least 97%, at least 98%, or at least 99% sequence identity to SEQ ID NO: 10 or a variant thereof. In some embodiments, the engineered guide RNA comprises a sequence with at least 80%, at least 81%, at least 82%, at least 83%, at least 84%, at least 85%, at least 86%, at least 87%, at least 88%, at least 89%, at least 90%, at least 91%, at least 92%, at least 93%, at least 94%, at least 95%, at least 96%, at least 97%, at least 98%, or at least 99% sequence identity to non-degenerate nucleotides of SEQ ID NO: 722 or SEQ ID NO: 863.

[0013] In some aspects, the present disclosure provides for a method of disrupting a GPR146 locus in a cell, comprising introducing to the cell: (a) a class 2, type II Cas endonuclease; and (b) an engineered guide RNA, wherein the engineered guide RNA is configured to form a complex with the endonuclease and the engineered guide RNA comprises a targeting sequence configured to hybridize to a region of the GPR146 locus, wherein the engineered guide RNA is configured to hybridize to or comprises a targeting sequence having at least 80%, at least 81%, at least 82%, at least 83%, at least 84%, at least 85%, at least 86%, at least 87%, at least 88%, at least 89%, at least 90%, at least 91%, at least 92%, at least 93%, at least 94%, at least 95%, at least 96%, at least 97%, at least 98%, or at least 99% sequence identity to SEQ ID NOs: 1657-1725; or wherein the engineered guide RNA comprises a sequence having at least 80%, at least 81%, at least 82%, at least 83%, at least 84%, at least 85%, at least 86%, at least 87%, at least 88%, at least 89%, at least 90%, at least 91%, at least 92%, at least 93%, at least 94%, at least 95%, at least 96%, at least 97%, at least 98%, or at least 99% sequence identity to any one of SEQ ID NOs: 1588-1656. In some embodiments, the class 2, type II Cas endonuclease comprises the fusion endonuclease described herein. In some embodiments, the engineered guide RNA comprises a sequence with at least 80%, at least 81%, at least 82%, at least 83%, at least 84%, at least 85%, at least 86%, at least 87%, at least 88%, at least 89%, at least 90%, at least 91%, at least 92%, at least 93%, at least 94%, at least 95%, at least 96%, at least 97%, at least 98%, or at least 99% sequence identity to non-degenerate nucleotides of SEQ ID NO: 722 or SEQ ID NO: 863.

[0014] In some aspects, the present disclosure provides for a method of disrupting an APOA1 locus in a cell, comprising introducing to the cell: (a) a class 2, type II Cas endonuclease; and (b) an engineered guide RNA, wherein the engineered guide RNA is configured to form a complex with the endonuclease and the engineered guide RNA comprises a targeting sequence configured to hybridize to a region of the APOA1 locus, wherein the engineered guide RNA is configured to hybridize to or comprises a targeting sequence having at least 80%, at least 81%, at least 82%, at least 83%, at least 84%, at least 85%, at least 86%, at least 87%, at least 88%, at least 89%, at least 90%, at least 91%, at least 92%, at least 93%, at least 94%, at least 95%, at least 96%, at least 97%, at least 98%, or at least 99% sequence identity to SEQ ID NOs: 1745-1763 or 1775-1785; or wherein the engineered guide RNA comprises a sequence at least 80%, at least 81%, at least 82%, at least 83%, at least 84%, at least 85%, at least 86%, at least 87%, at least 88%, at least 89%, at least 90%, at least 91%, at least 92%, at least 93%, at least 94%, at least 95%, at least 96%, at least 97%, at least 98%, or at least 99% sequence identity to any one of SEQ ID NOs: 1726-1744 or 1764-1774. In some embodiments, the class 2, type II Cas endonuclease comprises the fusion endonuclease described herein. In some embodiments, the engineered guide RNA comprises a sequence with at least 80%, at least 81%, at least 82%, at least 83%, at least 84%, at least 85%, at least 86%, at least 87%, at least 88%, at least 89%, at least 90%, at least 91%, at least 92%, at least 93%, at least 94%, at least 95%, at least 96%, at least 97%, at least 98%, or at least 99% sequence identity to non-degenerate nucleotides of SEQ ID NO: 722 or SEQ ID NO: 863.

[0015] In some aspects, the present disclosure provides for a lipid nanoparticle comprising: (a) any of the endonucleases described herein; (b) any of the engineered guide RNAs described herein: (c) a cationic lipid; (d) a sterol; (e) a neutral lipid; and (f) a PEG-modified lipid. In some embodiments, the cationic lipid comprises C12-200, the sterol comprises cholesterol, the neutral lipid comprises DOPE, or the PEG-modified lipid comprises DMG-PEG2000. In some embodiments, the cationic lipid comprises any of the cationic lipids depicted in FIG. 45.

[0016] In some aspects, the present disclosure provides for a fusion endonuclease comprising: (a) an N-terminal sequence comprising at least part of a RuvC domain, a REC domain, or an HNH domain of an endonuclease having at least 55%, at least 60%, at least 65%, at least 70%, at least 75%, at least 80%, at least 81%, at least 82%, at least 83%, at least 84%, at least 85%, at least 86%, at least 87%, at least 88%, at least 89%, at least 90%, at least 91%, at least 92%, at least 93%, at least 94%, at least 95%, at least 96%, at least 97%, at least 98%, or at least 99% sequence identity to SEQ ID NO: 696 or a variant thereof; and (b) a C-terminal sequence comprising WED, TOPO, or CTD domains of an endonuclease having at least 55%, at least 60%, at least 65%, at least 70%, at least 75%, at least 80%, at least 81%, at least 82%, at least 83%, at least 84%, at least 85%, at least 86%, at least 87%, at least 88%, at least 89%, at least 90%, at least 91%, at least 92%, at least 93%, at least 94%, at least 95%, at least 96%, at least 97%, at least 98%, or at least 99% sequence identity to any one of SEQ ID NOs: 697-721 or variants thereof, wherein the N-terminal sequence and the C-terminal sequence do not naturally occur together in a same reading frame. In some embodiments, the endonuclease is a Class 2, type II Cas endonuclease. In some embodiments, the endonuclease is a Class 2, type V Cas endonuclease. In some embodiments, the N-terminal sequence and the C-terminal sequence are derived from different organisms. In some embodiments, the N-terminal sequence further comprises RuvC-I, BH, or RuvC-II domains. In some embodiments, the C-terminal sequence further comprises a PAM-interacting domain. In some embodiments, the fusion endonuclease comprises a sequence having at least 55%, at least 60%, at least 65%, at least 70%, at least 75%, at least 80%, at least 81%, at least 82%, at least 83%, at least 84%, at least 85%, at least 86%, at least 87%, at least 88%, at least 89%, at least 90%, at least 91%, at least 92%, at least 93%, at least 94%, at least 95%, at least 96%, at least 97%, at least 98%, or at least 99% sequence identity to any one of SEQ ID NOs: 1-27 or 108. In some embodiments, the fusion endonuclease is configured to bind to a PAM that is not nnRGGnT.

[0017] In some aspects, the present disclosure provides for an endonuclease comprising an engineered amino acid sequence having at least 55%, at least 60%, at least 65%, at least 70%, at least 75%, at least 80%, at least 81%, at least 82%, at least 83%, at least 84%, at least 85%, at least 86%, at least 87%, at least 88%, at least 89%, at least 90%, at least 91%, at least 92%, at least 93%, at least 94%, at least 95%, at least 96%, at least 97%, at least 98%, or at least 99% sequence identity to any one of SEQ ID NOs: 1-27 or 108, or a variant thereof.

[0018] In some aspects, the present disclosure provides for an endonuclease comprising an engineered amino acid sequence having at least 55%, at least 60%, at least 65%, at least 70%, at least 75%, at least 80%, at least 81%, at least 82%, at least 83%, at least 84%, at least 85%, at least 86%, at least 87%, at least 88%, at least 89%, at least 90%, at least 91%, at least 92%, at least 93%, at least 94%, at least 95%, at least 96%, at least 97%, at least 98%, or at least 99% sequence identity to any one of SEQ ID NOs: 109-110, or a variant thereof.

[0019] In some aspects, the present disclosure provides for a nucleic acid comprising a sequence encoding any of the endonucleases, fusion endonucleases, or Cas enzymes described herein. In some aspects, the sequence is codon-optimized for expression in a host cell. In some embodiments, the host cell is prokaryotic, eukaryotic, mammal, or human.

[0020] In some aspects, the present disclosure provides for a vector comprising any of the nucleic acid sequences described herein.

[0021] In some aspects, the present disclosure provides for a host cell comprising any of the vectors, systems, or nucleic acids described herein. In some embodiments, the host cell is prokaryotic, eukaryotic, mammal, or human.

[0022] In some aspects, the present disclosure provides for an engineered nuclease system, comprising: (a) any of the nucleases, Cas enzymes, or fusion endonucleases described herein; and (b) an engineered guide ribonucleic structure configured to form a complex with the endonuclease comprising: a guide ribonucleic acid configured to hybridize to a target deoxyribonucleic acid sequence; wherein the guide ribonucleic acid sequence is configured to bind to the endonuclease. In some embodiments, the guide ribonucleic acid further comprises a tracr ribonucleic acid sequence configured to bind the endonuclease. In some embodiments, the endonuclease is derived from an uncultivated microorganism. In some embodiments, the endonuclease is not a Cas9 endonuclease, a Cas14 endonuclease, a Cas12a endonuclease, a Cas12b endonuclease, a Cas 12c endonuclease, a Cas12d endonuclease, a Cas12e endonuclease, a Cas13a endonuclease, a Cas13b endonuclease, a Cas13c endonuclease, or a Cas13d endonuclease. In some embodiments, the endonuclease has less than 86% identity to a SpyCas9 endonuclease. In some embodiments, the system further comprises a source of Mg²⁺. In some embodiments, the endonuclease comprises a sequence having at least 55%, at least 60%, at least 65%, at least 70%, at least 75%, at least 80%, at least 81%, at least 82%, at least 83%, at least 84%, at least 85%, at least 86%, at least 87%, at least 88%, at least 89%, at least 90%, at least 91%, at least 92%, at least 93%, at least 94%, at least 95%, at least 96%, at least 97%, at least 98%, or at least 99% sequence identity to any one of SEQ ID NOs: 8-12, 26-27, or 108, or a variant thereof. In some embodiments, the guide ribonucleic acid sequence comprises a sequence having at least 80%, at least 81%, at least 82%, at least 83%, at least 84%, at least 85%, at least 86%, at least 87%, at least 88%, at least 89%, at least 90%, at least 91%, at least 92%, at least 93%, at least 94%, at least 95%, at least 96%, at least 97%, at least 98%, or at least 99% identity to non-degenerate nucleotides of any one of SEQ ID NOs: 33, 34, 44, 45, 78, 84, or 87.

[0023] In some aspects, the present disclosure provides for an engineered nuclease comprising: (a) a class 2, type II Cas enzyme RuvC or HNH domain having at least 55%, at least 60%, at least 65%, at least 70%, at least 75%, at least 80%, at least 81%, at least 82%, at least 83%, at least 84%, at least 85%, at least 86%, at least 87%, at least 88%, at least 89%, at least 90%, at least 91%, at least 92%, at least 93%, at least 94%, at least 95%, at least 96%, at least 97%, at least 98%, or at least 99% sequence identity to a RuvC or HNH domain of any one of SEQ ID NOs: 1-27, 108, or 109-110, or variants thereof; and (b) a class 2, type II Cas enzyme PAM-interacting (PI) domain having at least 55%, at least 60%, at least 65%, at least 70%, at least 75%, at least 80%, at least 81%, at least 82%, at least 83%, at least 84%, at least 85%, at least 86%, at least 87%, at least 88%, at least 89%, at least 90%, at least 91%, at least 92%, at least 93%, at least 94%, at least 95%, at least 96%, at least 97%, at least 98%, or at least 99% sequence identity to a PAM-interacting (PI) domain any one of SEQ ID NOs: 1-27, 108, or 109-110, or variants thereof. In some embodiments, (a) and (b) do not naturally occur together. In some embodiments, the class 2, type II Cas enzyme is derived from an uncultivated microorganism. In some embodiments, the endonuclease has less than 86% identity to a SpyCas9 endonuclease. In some embodiments, the engineered nuclease comprises a sequence having at least 55%, at least 60%, at least 65%, at least 70%, at least 75%, at least 80%, at least 81%, at least 82%, at least 83%, at least 84%, at least 85%, at least 86%, at least 87%, at least 88%, at least 89%, at least 90%, at least 91%, at least 92%, at least 93%, at least 94%, at least 95%, at least 96%, at least 97%, at least 98%, or at least 99% sequence identity to any one of SEQ ID NOs: 1-27 or a variant thereof.

[0024] In some aspects, the present disclosure provides for an engineered nuclease system, comprising: (a) any of the endonucleases described herein; and (b) an engineered guide ribonucleic structure configured to form a complex with the endonuclease comprising: a guide ribonucleic acid sequence configured to hybridize to a target deoxyribonucleic acid sequence and configured to bind to the endonuclease. In some embodiments, the guide ribonucleic acid further comprises a tracr ribonucleic acid sequence configured to bind the endonuclease. In some embodiments, the guide ribonucleic acid sequence comprises a sequence having at least 80%, at least 81%, at least 82%, at least 83%, at least 84%, at least 85%, at least 86%, at least 87%, at least 88%, at least 89%, at least 90%, at least 91%, at least 92%, at least 93%, at least 94%, at least 95%, at least 96%, at least 97%, at least 98%, or at least 99% sequence identity to non-degenerate nucleotides of any one of SEQ ID NOs: 28-32 or 33-44, or a variant thereof. In some embodiments, the system further comprises a PAM sequence compatible with the nuclease adjacent to the target nucleic acid site. In some embodiments, the PAM sequence is located 3′ of the target deoxyribonucleic acid sequence. In some embodiments, the PAM sequence is located 5′ of the target deoxyribonucleic acid sequence.

[0025] In some aspects, the present disclosure provides for a method of targeting the albumin gene, comprising introducing any of the systems described herein to a cell, wherein the guide ribonucleic acid sequence is configured to hybridize to a sequence having at least 80%, at least 81%, at least 82%, at least 83%, at least 84%, at least 85%, at least 86%, at least 87%, at least 88%, at least 89%, at least 90%, at least 91%, at least 92%, at least 93%, at least 94%, at least 95%, at least 96%, at least 97%, at least 98%, or at least 99% sequence identity any one of SEQ ID NOs: 67-86. In some embodiments, introducing to the cell further comprises contacting the cell with a nucleic acid or vector encoding the fusion protein or the guide polynucleotide. or comprises contacting the cell with a lipid nanoparticle (LNP) comprising the vector or nucleic acid. In some embodiments, introducing to the cell further comprises contacting the cell with a ribonucleoprotein complex (RNP) comprising the fusion protein or the guide polynucleotide or comprises contacting the cell with a lipid nanoparticle (LNP) comprising the RNP.

[0026] In some aspects, the present disclosure provides for a method of targeting the HAO1 gene or locus, comprising introducing any of the systems described herein to a cell, wherein the guide ribonucleic acid sequence is configured to hybridize to a sequence having at least 80%, at least 81%, at least 82%, at least 83%, at least 84%, at least 85%, at least 86%, at least 87%, at least 88%, at least 89%, at least 90%, at least 91%, at least 92%, at least 93%, at least 94%, at least 95%, at least 96%, at least 97%, at least 98%, or at least 99% sequence identity to any one of SEQ ID NOs: 611-633. In some embodiments, the guide ribonucleic acid sequence is configured to hybridize to a sequence having at least 80%, at least 81%, at least 82%, at least 83%, at least 84%, at least 85%, at least 86%, at least 87%, at least 88%, at least 89%, at least 90%, at least 91%, at least 92%, at least 93%, at least 94%, at least 95%, at least 96%, at least 97%, at least 98%, or at least 99% sequence identity to any one of SEQ ID NOs: 615, 618, 620, 624, or 626. In some embodiments, the guide ribonucleic acid comprises a sequence having at least 80%, at least 81%, at least 82%, at least 83%, at least 84%, at least 85%, at least 86%, at least 87%, at least 88%, at least 89%, at least 90%, at least 91%, at least 92%, at least 93%, at least 94%, at least 95%, at least 96%, at least 97%, at least 98%, or at least 99% sequence identity to any one of SEQ ID NOs: 605-610 or 1789-1865. In some embodiments, the guide ribonucleic acid comprises a sequence having at least 80%, at least 81%, at least 82%, at least 83%, at least 84%, at least 85%, at least 86%, at least 87%, at least 88%, at least 89%, at least 90%, at least 91%, at least 92%, at least 93%, at least 94%, at least 95%, at least 96%, at least 97%, at least 98%, or at least 99% identity to any one of SEQ ID NOs: 1812-1824, 1835, 1849, 1858, or 1861, or a sequence having at least 80%, at least 81%, at least 82%, at least 83%, at least 84%, at least 85%, at least 86%, at least 87%, at least 88%, at least 89%, at least 90%, at least 91%, at least 92%, at least 93%, at least 94%, at least 95%, at least 96%, at least 97%, at least 98%, or at least 99% identity to a targeting sequence of any one of SEQ ID NOs: 1812-1824, 1835, 1849, 1858, or 1861. In some embodiments, introducing to the cell further comprises contacting the cell with a nucleic acid or vector encoding the fusion protein or the guide polynucleotide. or comprises contacting the cell with a lipid nanoparticle (LNP) comprising the vector or nucleic acid. In some embodiments, introducing to the cell further comprises contacting the cell with a ribonucleoprotein complex (RNP) comprising the fusion protein or the guide polynucleotide or comprises contacting the cell with a lipid nanoparticle (LNP) comprising the RNP.

[0027] In some embodiments, the present disclosure provides for a method of disrupting an HAO-1 locus in a cell, comprising introducing to the cell: (a) any of the endonucleases described herein; and (b) an engineered guide RNA, wherein the engineered guide RNA is configured to form a complex with the endonuclease and the engineered guide RNA comprises a targeting sequence configured to hybridize to a region of the HAO-1 locus, wherein the engineered guide RNA is configured to hybridize to or comprises a targeting sequence having at least 80%, at least 81%, at least 82%, at least 83%, at least 84%, at least 85%, at least 86%, at least 87%, at least 88%, at least 89%, at least 90%, at least 91%, at least 92%, at least 93%, at least 94%, at least 95%, at least 96%, at least 97%, at least 98%, or at least 99% sequence identity to SEQ ID NO: 611-633. In some embodiments, the endonuclease is a class 2, type II Cas endonuclease. In some embodiments, the class 2, type II Cas endonuclease comprises any of the fusion or engineered endonucleases described herein.

[0028] In some embodiments the endonuclease comprises any of the fusion or engineered endonucleases described herein. In some embodiments, the class 2, type II Cas endonuclease comprises a sequence having at least 55%, at least 60%, at least 65%, at least 70%, at least 75%, at least 80%, at least 81%, at least 82%, at least 83%, at least 84%, at least 85%, at least 86%, at least 87%, at least 88%, at least 89%, at least 90%, at least 91%, at least 92%, at least 93%, at least 94%, at least 95%, at least 96%, at least 97%, at least 98%, or at least 99% identity to SEQ ID NO: 10 or a variant thereof. In some embodiments, the engineered guide RNA comprises a sequence with at least 80%, at least 81%, at least 82%, at least 83%, at least 84%, at least 85%, at least 86%, at least 87%, at least 88%, at least 89%, at least 90%, at least 91%, at least 92%, at least 93%, at least 94%, at least 95%, at least 96%, at least 97%, at least 98%, or at least 99% sequence identity to non-degenerate nucleotides of SEQ ID NO: 722. In some embodiments, the engineered guide RNA comprises a sequence having at least 80%, at least 81%, at least 82%, at least 83%, at least 84%, at least 85%, at least 86%, at least 87%, at least 88%, at least 89%, at least 90%, at least 91%, at least 92%, at least 93%, at least 94%, at least 95%, at least 96%, at least 97%, at least 98%, or at least 99% sequence identity to any one of SEQ ID NOs: 618, 620, 624, or 626, or a sequence having at least 80%, at least 81%, at least 82%, at least 83%, at least 84%, at least 85%, at least 86%, at least 87%, at least 88%, at least 89%, at least 90%, at least 91%, at least 92%, at least 93%, at least 94%, at least 95%, at least 96%, at least 97%, at least 98%, or at least 99% sequence identity to a targeting sequence of any one of SEQ ID NOs: 618, 620, 624, or 626. In some embodiments, the engineered guide RNA comprises the nucleotide sequence of any one of the guide RNAs from Tables 9A-9E, Table 12, Table 18, Table 20, or Table 23. In some embodiments, the engineered guide RNA comprises a nucleotide sequence of any one of the guide RNAs from Tables 9A-9E, comprising the chemical modifications recited in Tables 9A-9E. In some embodiments, the engineered guide RNA comprises a nucleotide sequence of any one of the guide RNAs from Table 12, comprising the chemical modifications recited in Table 12. In some embodiments, the engineered guide RNA comprises a nucleotide sequence of any one of the guide RNAs from Table 18, comprising the chemical modifications recited in Table 18.

[0029] In some embodiments, the engineered guide RNA comprises a nucleotide sequence of any one of the guide RNAs from Table 20, comprising the chemical modifications recited in Table 20. In some embodiments, the engineered guide RNA comprises a nucleotide sequence of any one of the guide RNAs from Table 23, comprising the chemical modifications recited in Table 23. In some embodiments, the cell is a mammalian cell. In some embodiments, introducing to the cell further comprises contacting the cell with a nucleic acid or vector encoding the fusion protein or the guide polynucleotide. or comprises contacting the cell with a lipid nanoparticle (LNP) comprising the vector or nucleic acid. In some embodiments, introducing to the cell further comprises contacting the cell with a ribonucleoprotein complex (RNP) comprising the fusion protein or the guide polynucleotide or comprises contacting the cell with a lipid nanoparticle (LNP) comprising the RNP.

[0030] In some aspects, the present disclosure provides for a method of disrupting a TRAC locus in a cell, comprising introducing to the cell: (a) any of the endonucleases described herein; and (b) an engineered guide RNA, wherein the engineered guide RNA is configured to form a complex with the endonuclease and the engineered guide RNA comprises a targeting sequence configured to hybridize to a region of the TRAC locus, wherein the engineered guide RNA is configured to hybridize to or comprises a targeting sequence having at least 80%, at least 81%, at least 82%, at least 83%, at least 84%, at least 85%, at least 86%, at least 87%, at least 88%, at least 89%, at least 90%, at least 91%, at least 92%, at least 93%, at least 94%, at least 95%, at least 96%, at least 97%, at least 98%, or at least 99% identity to SEQ ID NOs: 139-158; or wherein the engineered guide RNA comprises a sequence having at least 80%, at least 81%, at least 82%, at least 83%, at least 84%, at least 85%, at least 86%, at least 87%, at least 88%, at least 89%, at least 90%, at least 91%, at least 92%, at least 93%, at least 94%, at least 95%, at least 96%, at least 97%, at least 98%, or at least 99% identity to any one of SEQ ID NOs: 119-138. In some embodiments, the endonuclease is a class 2, type II Cas endonuclease. In some embodiments, the class 2, type II Cas endonuclease comprises any of the fusion or engineered endonucleases described herein. In some embodiments the endonuclease comprises any of the fusion or engineered endonucleases described herein. In some embodiments, the class 2, type II Cas endonuclease comprises any of the fusion endonucleases described herein. In some embodiments, the class 2, type II Cas endonuclease comprises the fusion endonuclease having at least 55% identity to SEQ ID NO: 10 or a variant thereof. In some embodiments, the engineered guide RNA comprises a sequence with at least 80%, at least 81%, at least 82%, at least 83%, at least 84%, at least 85%, at least 86%, at least 87%, at least 88%, at least 89%, at least 90%, at least 91%, at least 92%, at least 93%, at least 94%, at least 95%, at least 96%, at least 97%, at least 98%, or at least 99% sequence identity to non-degenerate nucleotides of SEQ ID NO: 722. In some embodiments, the engineered guide RNA comprises a sequence having at least 80%, at least 81%, at least 82%, at least 83%, at least 84%, at least 85%, at least 86%, at least 87%, at least 88%, at least 89%, at least 90%, at least 91%, at least 92%, at least 93%, at least 94%, at least 95%, at least 96%, at least 97%, at least 98%, or at least 99% identity to any one of SEQ ID NOs: 121, 132, 136, 130, 134, 135, or 137, or a sequence having at least 80% identity to a targeting sequence of any one of SEQ ID NOs: 121, 132, 136, 130, 134, 135, or 137. In some embodiments, the engineered guide RNA comprises a nucleotide sequence of any one of the guide RNAs from Table 9A. In some embodiments, introducing to the cell further comprises contacting the cell with a nucleic acid or vector encoding the fusion protein or the guide polynucleotide. or comprises contacting the cell with a lipid nanoparticle (LNP) comprising the vector or nucleic acid. In some embodiments, introducing to the cell further comprises contacting the cell with a ribonucleoprotein complex (RNP) comprising the fusion protein or the guide polynucleotide or comprises contacting the cell with a lipid nanoparticle (LNP) comprising the RNP.

[0031] In some embodiments, the present disclosure provides for a method of disrupting a B2M locus in a cell, comprising introducing to the cell: (a) any of the endonucleases described herein; and (b) an engineered guide RNA, wherein the engineered guide RNA is configured to form a complex with the endonuclease and the engineered guide RNA comprises a targeting sequence configured to hybridize to a region of the B2M locus, wherein the engineered guide RNA is configured to hybridize to or comprises a targeting sequence having at least 80%, at least 81%, at least 82%, at least 83%, at least 84%, at least 85%, at least 86%, at least 87%, at least 88%, at least 89%, at least 90%, at least 91%, at least 92%, at least 93%, at least 94%, at least 95%, at least 96%, at least 97%, at least 98%, or at least 99% identity to SEQ ID NOs: 185-210; or wherein the engineered guide RNA comprises a sequence having at least 80%, at least 81%, at least 82%, at least 83%, at least 84%, at least 85%, at least 86%, at least 87%, at least 88%, at least 89%, at least 90%, at least 91%, at least 92%, at least 93%, at least 94%, at least 95%, at least 96%, at least 97%, at least 98%, or at least 99% identity to any one of SEQ ID NOs: 159-184. In some embodiments, the endonuclease is a class 2, type II Cas endonuclease. In some embodiments, the class 2, type II Cas endonuclease comprises any of the fusion or engineered endonucleases described herein.

[0032] In some embodiments the endonuclease comprises any of the fusion or engineered endonucleases described herein. In some embodiments, the class 2, type II Cas endonuclease comprises any of the fusion endonucleases described herein. In some embodiments, the class 2, type II Cas endonuclease comprises a fusion endonuclease comprising a sequence having at least 55%, at least 60%, at least 65%, at least 70%, at least 75%, at least 80%, at least 81%, at least 82%, at least 83%, at least 84%, at least 85%, at least 86%, at least 87%, at least 88%, at least 89%, at least 90%, at least 91%, at least 92%, at least 93%, at least 94%, at least 95%, at least 96%, at least 97%, at least 98%, or at least 99% identity to SEQ ID NO: 10 or a variant thereof. In some embodiments, the engineered guide RNA comprises a sequence with at least 80%, at least 81%, at least 82%, at least 83%, at least 84%, at least 85%, at least 86%, at least 87%, at least 88%, at least 89%, at least 90%, at least 91%, at least 92%, at least 93%, at least 94%, at least 95%, at least 96%, at least 97%, at least 98%, or at least 99% sequence identity to the non-degenerate nucleotides of SEQ ID NO: 722. In some embodiments, the engineered guide RNA comprises a sequence having at least 80%, at least 81%, at least 82%, at least 83%, at least 84%, at least 85%, at least 86%, at least 87%, at least 88%, at least 89%, at least 90%, at least 91%, at least 92%, at least 93%, at least 94%, at least 95%, at least 96%, at least 97%, at least 98%, or at least 99% identity to any one of SEQ ID NOs: 159, 165, 168, 174, or 184, or a sequence having at least 80%, at least 81%, at least 82%, at least 83%, at least 84%, at least 85%, at least 86%, at least 87%, at least 88%, at least 89%, at least 90%, at least 91%, at least 92%, at least 93%, at least 94%, at least 95%, at least 96%, at least 97%, at least 98%, or at least 99% identity to a targeting sequence of any one of SEQ ID NOs: 159, 165, 168, 174, or 184. In some embodiments, the engineered guide RNA comprises a nucleotide sequence of any one of the guide RNAs from Table 9B. In some embodiments, introducing to the cell further comprises contacting the cell with a nucleic acid or vector encoding the fusion protein or the guide polynucleotide. or comprises contacting the cell with a lipid nanoparticle (LNP) comprising the vector or nucleic acid. In some embodiments, introducing to the cell further comprises contacting the cell with a ribonucleoprotein complex (RNP) comprising the fusion protein or the guide polynucleotide or comprises contacting the cell with a lipid nanoparticle (LNP) comprising the RNP.

[0033] In some aspects, the present disclosure provides for a method of disrupting a TRBC1 locus in a cell, comprising introducing to the cell: (a) any of the endonucleases described herein; and (b) an engineered guide RNA, wherein the engineered guide RNA is configured to form a complex with the endonuclease and the engineered guide RNA comprises a targeting sequence configured to hybridize to a region of the TRBC1 locus, wherein the engineered guide RNA is configured to hybridize to or comprises a targeting sequence having at least 80%, at least 81%, at least 82%, at least 83%, at least 84%, at least 85%, at least 86%, at least 87%, at least 88%, at least 89%, at least 90%, at least 91%, at least 92%, at least 93%, at least 94%, at least 95%, at least 96%, at least 97%, at least 98%, or at least 99% identity to SEQ ID NOs: 252-292; or wherein the engineered guide RNA comprises a sequence having at least 80%, at least 81%, at least 82%, at least 83%, at least 84%, at least 85%, at least 86%, at least 87%, at least 88%, at least 89%, at least 90%, at least 91%, at least 92%, at least 93%, at least 94%, at least 95%, at least 96%, at least 97%, at least 98%, or at least 99% identity to any one of SEQ ID NOs: 211-251. In some embodiments, the endonuclease is a class 2, type II Cas endonuclease. In some embodiments, the class 2, type II Cas endonuclease comprises any of the fusion or engineered endonucleases described herein. In some embodiments the endonuclease comprises any of the fusion or engineered endonucleases described herein. In some embodiments, the class 2, type II Cas endonuclease comprises any of the fusion endonucleases described herein. In some embodiments, the class 2, type II Cas endonuclease comprises a fusion endonuclease comprising a sequence having at least 55%, at least 60%, at least 65%, at least 70%, at least 75%, at least 80%, at least 81%, at least 82%, at least 83%, at least 84%, at least 85%, at least 86%, at least 87%, at least 88%, at least 89%, at least 90%, at least 91%, at least 92%, at least 93%, at least 94%, at least 95%, at least 96%, at least 97%, at least 98%, or at least 99% identity to SEQ ID NO: 10 or a variant thereof. In some embodiments, the engineered guide RNA comprises a sequence with at least 80%, at least 81%, at least 82%, at least 83%, at least 84%, at least 85%, at least 86%, at least 87%, at least 88%, at least 89%, at least 90%, at least 91%, at least 92%, at least 93%, at least 94%, at least 95%, at least 96%, at least 97%, at least 98%, or at least 99% sequence identity to the non-degenerate nucleotides of SEQ ID NO: 722. In some embodiments, the engineered guide RNA is comprises a sequence having at least 80% identity to any one of SEQ ID NOs: 211, 212, 215, 241, or 242, or comprises a targeting sequence having at least 80%, at least 81%, at least 82%, at least 83%, at least 84%, at least 85%, at least 86%, at least 87%, at least 88%, at least 89%, at least 90%, at least 91%, at least 92%, at least 93%, at least 94%, at least 95%, at least 96%, at least 97%, at least 98%, or at least 99% identity to a targeting sequence of any one of SEQ ID NOs: 211, 212, 215, 241, or 242. In some embodiments, the engineered guide RNA comprises a nucleotide sequence of any one of the guide RNAs from Table 9C. In some embodiments, introducing to the cell further comprises contacting the cell with a nucleic acid or vector encoding the fusion protein or the guide polynucleotide. or comprises contacting the cell with a lipid nanoparticle (LNP) comprising the vector or nucleic acid. In some embodiments, introducing to the cell further comprises contacting the cell with a ribonucleoprotein complex (RNP) comprising the fusion protein or the guide polynucleotide or comprises contacting the cell with a lipid nanoparticle (LNP) comprising the RNP.

[0034] In some aspects, the present disclosure provides for a method of disrupting a TRBC2 locus in a cell, comprising introducing to the cell: (a) any of the endonucleases described herein; and (b) an engineered guide RNA, wherein the engineered guide RNA is configured to form a complex with the endonuclease and the engineered guide RNA comprises a targeting sequence configured to hybridize to a region of the TRBC2 locus, wherein the engineered guide RNA is configured to hybridize to or comprises a targeting sequence having at least 80%, at least 81%, at least 82%, at least 83%, at least 84%, at least 85%, at least 86%, at least 87%, at least 88%, at least 89%, at least 90%, at least 91%, at least 92%, at least 93%, at least 94%, at least 95%, at least 96%, at least 97%, at least 98%, or at least 99% identity to SEQ ID NOs: 338-382; or wherein the engineered guide RNA comprises a sequence having at least 80%, at least 81%, at least 82%, at least 83%, at least 84%, at least 85%, at least 86%, at least 87%, at least 88%, at least 89%, at least 90%, at least 91%, at least 92%, at least 93%, at least 94%, at least 95%, at least 96%, at least 97%, at least 98%, or at least 99% identity to any one of SEQ ID NOs: 293-337. In some embodiments, the endonuclease is a class 2, type II Cas endonuclease. In some embodiments, the class 2, type II Cas endonuclease comprises any of the fusion or engineered endonucleases described herein. In some embodiments the endonuclease comprises any of the fusion or engineered endonucleases described herein. In some embodiments, the class 2, type II Cas endonuclease any of the fusion endonucleases described herein. In some embodiments, the class 2, type II Cas endonuclease comprises a fusion endonuclease comprising a sequence having at least 55%, at least 60%, at least 65%, at least 70%, at least 75%, at least 80%, at least 81%, at least 82%, at least 83%, at least 84%, at least 85%, at least 86%, at least 87%, at least 88%, at least 89%, at least 90%, at least 91%, at least 92%, at least 93%, at least 94%, at least 95%, at least 96%, at least 97%, at least 98%, or at least 99% identity to SEQ ID NO: 10 or a variant thereof. In some embodiments, the engineered guide RNA comprises a sequence with at least 80%, at least 81%, at least 82%, at least 83%, at least 84%, at least 85%, at least 86%, at least 87%, at least 88%, at least 89%, at least 90%, at least 91%, at least 92%, at least 93%, at least 94%, at least 95%, at least 96%, at least 97%, at least 98%, or at least 99% sequence identity to the non-degenerate nucleotides of SEQ ID NO: 722. In some embodiments, the engineered guide RNA comprises a sequence having at least 80%, at least 81%, at least 82%, at least 83%, at least 84%, at least 85%, at least 86%, at least 87%, at least 88%, at least 89%, at least 90%, at least 91%, at least 92%, at least 93%, at least 94%, at least 95%, at least 96%, at least 97%, at least 98%, or at least 99% identity to any one of SEQ ID NOs: 296, 306, or 332, or comprises a targeting sequence having at least 80%, at least 81%, at least 82%, at least 83%, at least 84%, at least 85%, at least 86%, at least 87%, at least 88%, at least 89%, at least 90%, at least 91%, at least 92%, at least 93%, at least 94%, at least 95%, at least 96%, at least 97%, at least 98%, or at least 99% identity to a targeting sequence of any one of SEQ ID Nos: 296, 306, or 332. In some embodiments, the engineered guide RNA comprises a nucleotide sequence of any one of the guide RNAs from Table 9C. In some embodiments, introducing to the cell further comprises contacting the cell with a nucleic acid or vector encoding the fusion protein or the guide polynucleotide. or comprises contacting the cell with a lipid nanoparticle (LNP) comprising the vector or nucleic acid. In some embodiments, introducing to the cell further comprises contacting the cell with a ribonucleoprotein complex (RNP) comprising the fusion protein or the guide polynucleotide or comprises contacting the cell with a lipid nanoparticle (LNP) comprising the RNP.

[0035] In some aspects, the present disclosure provides for a method of disrupting an ANGPTL3 locus in a cell, comprising introducing to the cell: (a) any of the endonucleases described herein; and (b) an engineered guide RNA, wherein the engineered guide RNA is configured to form a complex with the endonuclease and the engineered guide RNA comprises a targeting sequence configured to hybridize to a region of the ANGPTL3 locus, wherein the engineered guide RNA is configured to hybridize to or comprises a targeting sequence having at least 80% identity to SEQ ID NOs: 478-572; or wherein the engineered guide RNA comprises a sequence having at least 80%, at least 81%, at least 82%, at least 83%, at least 84%, at least 85%, at least 86%, at least 87%, at least 88%, at least 89%, at least 90%, at least 91%, at least 92%, at least 93%, at least 94%, at least 95%, at least 96%, at least 97%, at least 98%, or at least 99% identity to any one of SEQ ID NOs: 383-477. In some embodiments, the endonuclease is a class 2, type II Cas endonuclease. In some embodiments, the class 2, type II Cas endonuclease comprises any of the fusion or engineered endonucleases described herein. In some embodiments the endonuclease comprises any of the fusion or engineered endonucleases described herein. In some embodiments, the class 2, type II Cas endonuclease comprises any of the fusion endonucleases described herein. In some embodiments, the class 2, type II Cas endonuclease comprises a fusion endonuclease having at least 55%, at least 60%, at least 65%, at least 70%, at least 75%, at least 80%, at least 81%, at least 82%, at least 83%, at least 84%, at least 85%, at least 86%, at least 87%, at least 88%, at least 89%, at least 90%, at least 91%, at least 92%, at least 93%, at least 94%, at least 95%, at least 96%, at least 97%, at least 98%, or at least 99% identity to SEQ ID NO: 10 or a variant thereof. In some embodiments, the engineered guide RNA comprises a sequence with at least 80%, at least 81%, at least 82%, at least 83%, at least 84%, at least 85%, at least 86%, at least 87%, at least 88%, at least 89%, at least 90%, at least 91%, at least 92%, at least 93%, at least 94%, at least 95%, at least 96%, at least 97%, at least 98%, or at least 99% sequence identity to a non-degenerate nucleotides of SEQ ID NO: 722. In some embodiments, the engineered guide RNA comprises a sequence having at least 80%, at least 81%, at least 82%, at least 83%, at least 84%, at least 85%, at least 86%, at least 87%, at least 88%, at least 89%, at least 90%, at least 91%, at least 92%, at least 93%, at least 94%, at least 95%, at least 96%, at least 97%, at least 98%, or at least 99% identity to any one of SEQ ID NOs: 419, 425, 431, 439, 447, 453, 461, 467, 471, or 473, or a sequence having at least 80%, at least 81%, at least 82%, at least 83%, at least 84%, at least 85%, at least 86%, at least 87%, at least 88%, at least 89%, at least 90%, at least 91%, at least 92%, at least 93%, at least 94%, at least 95%, at least 96%, at least 97%, at least 98%, or at least 99% identity to any one of SEQ ID NOs: 419, 425, 431, 439, 447, 453, 461, 467, 471, or 473. In some embodiments, the engineered guide RNA comprises a nucleotide sequence of any one of the guide RNAs from Table 9D. In some embodiments, introducing to the cell further comprises contacting the cell with a nucleic acid or vector encoding the fusion protein or the guide polynucleotide. or comprises contacting the cell with a lipid nanoparticle (LNP) comprising the vector or nucleic acid. In some embodiments, introducing to the cell further comprises contacting the cell with a ribonucleoprotein complex (RNP) comprising the fusion protein or the guide polynucleotide or comprises contacting the cell with a lipid nanoparticle (LNP) comprising the RNP.

[0036] In some aspects, the present disclosure provides for a method of disrupting a PCSK9 locus in a cell, comprising introducing to the cell: (a) any of the endonucleases described herein; and (b) an engineered guide RNA, wherein the engineered guide RNA is configured to form a complex with the endonuclease and the engineered guide RNA comprises a targeting sequence configured to hybridize to a region of the PCSK9 locus, wherein the engineered guide RNA is configured to hybridize to or comprises a targeting sequence having at least 80%, at least 81%, at least 82%, at least 83%, at least 84%, at least 85%, at least 86%, at least 87%, at least 88%, at least 89%, at least 90%, at least 91%, at least 92%, at least 93%, at least 94%, at least 95%, at least 96%, at least 97%, at least 98%, or at least 99% identity to SEQ ID NOs: 588-602; or wherein the engineered guide RNA comprises a sequence having at least 80%, at least 81%, at least 82%, at least 83%, at least 84%, at least 85%, at least 86%, at least 87%, at least 88%, at least 89%, at least 90%, at least 91%, at least 92%, at least 93%, at least 94%, at least 95%, at least 96%, at least 97%, at least 98%, or at least 99% identity to any one of SEQ ID NOs: 573-587. In some embodiments, the endonuclease is a class 2, type II Cas endonuclease. In some embodiments, the class 2, type II Cas endonuclease comprises any of the fusion or engineered endonucleases described herein. In some embodiments the endonuclease comprises any of the fusion or engineered endonucleases described herein. In some embodiments, the class 2, type II Cas endonuclease comprises any of the fusion endonucleases described herein. In some embodiments, the class 2, type II Cas endonuclease comprises a fusion endonuclease comprising a sequence having at least 55%, at least 60%, at least 65%, at least 70%, at least 75%, at least 80%, at least 81%, at least 82%, at least 83%, at least 84%, at least 85%, at least 86%, at least 87%, at least 88%, at least 89%, at least 90%, at least 91%, at least 92%, at least 93%, at least 94%, at least 95%, at least 96%, at least 97%, at least 98%, or at least 99% identity to SEQ ID NO: 10 or a variant thereof. In some embodiments, the engineered guide RNA comprises a sequence with at least 80%, at least 81%, at least 82%, at least 83%, at least 84%, at least 85%, at least 86%, at least 87%, at least 88%, at least 89%, at least 90%, at least 91%, at least 92%, at least 93%, at least 94%, at least 95%, at least 96%, at least 97%, at least 98%, or at least 99% sequence identity to the non-degenerate nucleotides of SEQ ID NO: 722. In some embodiments, the engineered guide comprises a sequence having at least 80%, at least 81%, at least 82%, at least 83%, at least 84%, at least 85%, at least 86%, at least 87%, at least 88%, at least 89%, at least 90%, at least 91%, at least 92%, at least 93%, at least 94%, at least 95%, at least 96%, at least 97%, at least 98%, or at least 99% identity to any one of SEQ ID NOs: 574, 578, 581, or 585. In some embodiments, the engineered guide RNA comprises a nucleotide sequence of any one of the guide RNAs from Table 9E. In some embodiments, introducing to the cell further comprises contacting the cell with a nucleic acid or vector encoding the fusion protein or the guide polynucleotide. or comprises contacting the cell with a lipid nanoparticle (LNP) comprising the vector or nucleic acid. In some embodiments, introducing to the cell further comprises contacting the cell with a ribonucleoprotein complex (RNP) comprising the fusion protein or the guide polynucleotide or comprises contacting the cell with a lipid nanoparticle (LNP) comprising the RNP.

[0037] In some embodiments, the present disclosure provides for a method of disrupting an albumin locus in a cell, comprising introducing to the cell: (a) any of the endonucleases described herein; and (b) an engineered guide RNA, wherein the engineered guide RNA is configured to form a complex with the endonuclease and the engineered guide RNA comprises a targeting sequence configured to hybridize to a region of the albumin locus, wherein the engineered guide RNA comprises a sequence having at least 80%, at least 81%, at least 82%, at least 83%, at least 84%, at least 85%, at least 86%, at least 87%, at least 88%, at least 89%, at least 90%, at least 91%, at least 92%, at least 93%, at least 94%, at least 95%, at least 96%, at least 97%, at least 98%, or at least 99% identity to any one of SEQ ID NOs: 67-86 or 646-695, or wherein the engineered guide RNA comprises a targeting sequence having at least 80%, at least 81%, at least 82%, at least 83%, at least 84%, at least 85%, at least 86%, at least 87%, at least 88%, at least 89%, at least 90%, at least 91%, at least 92%, at least 93%, at least 94%, at least 95%, at least 96%, at least 97%, at least 98%, or at least 99% identity to a targeting sequence of any one of SEQ ID NOs: 67-86 or 646-695. In some embodiments, the endonuclease is a class 2, type II Cas endonuclease. In some embodiments, the class 2, type II Cas endonuclease comprises any of the fusion or engineered endonucleases described herein. In some embodiments the endonuclease comprises any of the fusion or engineered endonucleases described herein. In some embodiments, the class 2, type II Cas endonuclease comprises any of the type II Cas endonucleases described herein. In some embodiments, the class 2, type II Cas endonuclease comprises a fusion endonuclease having at least 55%, at least 60%, at least 65%, at least 70%, at least 75%, at least 80%, at least 81%, at least 82%, at least 83%, at least 84%, at least 85%, at least 86%, at least 87%, at least 88%, at least 89%, at least 90%, at least 91%, at least 92%, at least 93%, at least 94%, at least 95%, at least 96%, at least 97%, at least 98%, or at least 99% identity to SEQ ID NO: 10 or a variant thereof. In some embodiments, the engineered guide RNA comprises a sequence with at least 80%, at least 81%, at least 82%, at least 83%, at least 84%, at least 85%, at least 86%, at least 87%, at least 88%, at least 89%, at least 90%, at least 91%, at least 92%, at least 93%, at least 94%, at least 95%, at least 96%, at least 97%, at least 98%, or at least 99% sequence identity to non-degenerate nucleotides of SEQ ID NO: 722. In some embodiments, the engineered guide RNA is complementary to or comprises a sequence having at least 80%, at least 81%, at least 82%, at least 83%, at least 84%, at least 85%, at least 86%, at least 87%, at least 88%, at least 89%, at least 90%, at least 91%, at least 92%, at least 93%, at least 94%, at least 95%, at least 96%, at least 97%, at least 98%, or at least 99% identity to any one of SEQ ID NOs: 67, 68, 70, 71, 72, 76, 79, 80, 647, 648, 649, 653, 654, 655, 656, 673, 680, 681, or 682. In some embodiments, the engineered guide RNA comprises a nucleotide sequence of any one of the guide RNAs from Table 6. In some embodiments, introducing to the cell further comprises contacting the cell with a nucleic acid or vector encoding the fusion protein or the guide polynucleotide. or comprises contacting the cell with a lipid nanoparticle (LNP) comprising the vector or nucleic acid. In some embodiments, introducing to the cell further comprises contacting the cell with a ribonucleoprotein complex (RNP) comprising the fusion protein or the guide polynucleotide or comprises contacting the cell with a lipid nanoparticle (LNP) comprising the RNP.

[0038] In some aspects, the present disclosure provides for an endonuclease comprising an engineered amino acid sequence having at least 55% sequence identity to any one of SEQ ID NOs: 1-27, 108, or 109-110.

[0039] In some aspects, the present disclosure provides an engineered nuclease system, comprising the endonuclease described herein, and an engineered guide ribonucleic structure configured to form a complex with the endonuclease comprising: a guide ribonucleic acid sequence configured to hybridize to a target deoxyribonucleic acid sequence; and a tracr ribonucleic acid sequence configured to bind to the endonuclease. In some embodiments, the endonuclease is derived from an uncultivated microorganism. In some embodiments, the endonuclease is not a Cas9 endonuclease, a Cas14 endonuclease, a Cas12a endonuclease, a Cas12b endonuclease, a Cas 12c endonuclease, a Cas12d endonuclease, a Cas12e endonuclease, a Cas13a endonuclease, a Cas13b endonuclease, a Cas13c endonuclease, or a Cas13d endonuclease. In some embodiments, the endonuclease has less than 86% identity to a SpyCas9 endonuclease. In some embodiments, the system further comprises a source of MG²⁺.

[0040] In some aspects, the present disclosure provides for an engineered nuclease comprising: (a) a class 2, type II Cas enzyme RuvC and HNH domain having at least 55% sequence identity to a RuvC and HNH domain of any one of SEQ ID NOs: 1-27, 108, or 109-110; and (b) a class 2, type II Cas enzyme PAM-interacting (PI) domain having at least 55% sequence identity to a PAM-interacting (PI) domain any one of SEQ ID NOs: 1-27, 108, or 109-110. In some embodiments, (a) and (b) do not naturally occur together. In some embodiments, the class 2, type II Cas enzyme is derived from an uncultivated microorganism. In some embodiments, the endonuclease has less than 86% identity to a SpyCas9 endonuclease. In some embodiments, the engineered nuclease comprises a sequence having at least 55% sequence identity to any one of SEQ ID NOs: 1-27.

[0041] In some aspects, the present disclosure provides for an engineered nuclease system, comprising: an endonuclease according to any of the aspects or embodiments described herein; and an engineered guide ribonucleic structure configured to form a complex with the endonuclease comprising: a guide ribonucleic acid sequence configured to hybridize to a target deoxyribonucleic acid sequence; and a tracr ribonucleic acid sequence configured to bind to the endonuclease. In some embodiments, the guide ribonucleic acid sequence comprises a sequence having at least 80% sequence identity to non-degenerate nucleotides of any one of SEQ ID NOs: 28-32 or 33-44, or a variant thereof. In some embodiments, the system further comprises a PAM sequence compatible with the nuclease adjacent to the target nucleic acid site. In some embodiments, the PAM sequence is located 3′ of the target deoxyribonucleic acid sequence.

[0042] In some embodiments, the present disclosure provides for an engineered single-molecule heterologous guide polynucleotide compatible with a class 2, type II enzyme according to any of the aspects or embodiments described herein, wherein the heterologous guide polynucleotide comprises chemical modifications according to any one of SEQ ID NOs: 605-610 or 1789-1865.

[0043] In some aspects, the present disclosure provides for a method of targeting the albumin gene, comprising introducing a system according to any one of the aspects or embodiments described herein to a cell, wherein the guide ribonucleic acid sequence is configured to hybridize to a sequence comprising any one of SEQ ID NOs: 67-86.

[0044] In some aspects, the present disclosure provides for a method of targeting the HAO1 gene, comprising introducing a system according to any one of the aspects or embodiments described herein to a cell, wherein the guide ribonucleic acid sequence is configured to hybridize to any one of SEQ ID NOs: 611-633. In some embodiments, the guide ribonucleic acid sequence is configured to hybridize to any one of SEQ ID NOs: 615, 618, 620, 624, or 626. In some embodiments, the guide ribonucleic acid comprises a sequence according to any one of SEQ ID NOs: 605-610 or 1789-1865. In some embodiments, the guide ribonucleic acid comprises a sequence according to any one of SEQ ID NOs: 1812-1824, 1835, 1849, 1858, or 1861.

[0045] In some aspects, the present disclosure provides cells comprising the endonucleases described herein. In some aspects, the present disclosure provides cells comprising any nucleic acid molecule described herein. In some aspects, the present disclosure provides cells comprising any engineered nuclease system described herein.

[0046] Described herein, in certain embodiments, are engineered endonucleases, comprising: a) an N-terminal portion comprising a sequence having at least 80% sequence identity to SEQ ID NO: 696; and b) a C-terminal portion comprising a sequence having at least 80% sequence identity to any one of SEQ ID NOs: 697-721. In some embodiments, the N-terminal portion and the C-terminal portion are fused directly to each other. In some embodiments, the N-terminal portion and the C-terminal portion are joined by a linker. In some embodiments, the linker is a glycine and/or serine-rich linker, a large protein domain, a long helix structure, or a short helix structure. In some embodiments, the linker is (GGGGS)n, and wherein n is an integer from 1 to 20. (SEQ ID NO: 2950) In some embodiments, the linker is GGGGS (SEQ ID NO: 2864). In some embodiments, the N-terminal portion comprises a sequence having at least 90% sequence identity to SEQ ID NO: 696. In some embodiments, the N-terminal portion comprises a sequence having 100% sequence identity to SEQ ID NO: 696. In some embodiments, the C-terminal portion comprises a sequence having at least 90% sequence identity to any one of SEQ ID NOs: 697-721. In some embodiments, the C-terminal portion comprises a sequence having 100% sequence identity to any one of SEQ ID NOs: 697-721. In some embodiments, the engineered endonuclease is configured to bind to a PAM that comprises any one of SEQ ID NOs: 60-66, 117, 865-919, and 2855-2863.

[0047] Described herein, in certain embodiments, are engineered endonucleases comprising a sequence having at least 80% sequence identity to any one of SEQ ID NOs: 1-27 and 771-862. In some embodiments, the engineered endonuclease comprises a sequence having at least 90% sequence identity to any one of SEQ ID NOs: 1-27 and 771-862. In some embodiments, the engineered endonuclease comprises a sequence having 100% sequence identity to any one of SEQ ID NOs: 1-27 and 771-862.

[0048] Described herein, in certain embodiments, are engineered endonucleases comprising a sequence having at least 80% sequence identity to SEQ ID NO: 10. In some embodiments, the engineered endonuclease comprises a sequence having at least 90% sequence identity to SEQ ID NO: 10. In some embodiments, the engineered endonuclease comprises a sequence having 100% sequence identity to SEQ ID NO: 10.

[0049] Described herein, in certain embodiments, are engineered endonucleases comprising a sequence having at least 80% sequence identity to any one of SEQ ID NOs: 109-110 and 2842-2854. In some embodiments, the engineered endonuclease comprises a sequence having at least 90% sequence identity to any one of SEQ ID NOs: 109-110 and 2842-2854. In some embodiments, the engineered endonuclease comprises a sequence having 100% sequence identity to any one of SEQ ID NOs: 109-110 and 2842-2854.

[0050] Described herein, in certain embodiments, are engineered nuclease systems, comprising: a) an engineered endonuclease comprising a sequence having at least 80% sequence identity to any one of SEQ ID NOs: 1-27 and 771-862; and b) an engineered guide polynucleotide configured to form a complex with the endonuclease and to hybridize to a target nucleic acid sequence. In some embodiments, the engineered endonuclease comprises a sequence having at least 90% sequence identity to any one of SEQ ID NOs: 1-27 and 771-862. In some embodiments, the engineered endonuclease comprises a sequence having 100% sequence identity to any one of SEQ ID NOs: 1-27 and 771-862. In some embodiments, the engineered guide polynucleotide is a single guide nucleic acid. In some embodiments, the engineered guide polynucleotide is a dual guide nucleic acid. In some embodiments, the engineered guide polynucleotide is RNA. In some embodiments, the engineered endonuclease binds non-covalently to the engineered guide polynucleotide. In some embodiments, the endonuclease is covalently linked to the engineered guide polynucleotide. In some embodiments, the endonuclease is fused to the engineered guide polynucleotide. In some embodiments, the engineered guide polynucleotide comprises a sequence having at least 90% sequence identity to any one of SEQ ID NOs: 28-45, 605-610, 646-695, 863, and 1789-1826. In some embodiments, the engineered guide polynucleotide comprises a sequence having 100% sequence identity to any one of SEQ ID NOs: 28-45, 605-610, 646-695, 863, and 1789-1826. In some embodiments, the engineered endonuclease is configured to bind to a PAM that comprises any one of SEQ ID NOs: 60-66, 865-919, and 2863.

[0051] Described herein, in certain embodiments, are engineered nuclease systems, comprising: a) an engineered endonuclease comprising a sequence having at least 80% sequence identity to any one of SEQ ID NOs: 109-110 and 2842-2854; and b) an engineered guide polynucleotide configured to form a complex with the endonuclease and to hybridize to a target nucleic acid sequence. In some embodiments, the engineered endonuclease comprises a sequence having at least 90% sequence identity to any one of SEQ ID NOs: 109-110 and 2842-2854. In some embodiments, the engineered endonuclease comprises a sequence having 100% sequence identity to any one of SEQ ID NOs: 109-110 and 2842-2854. In some embodiments, the engineered guide polynucleotide is a single guide nucleic acid. In some embodiments, the engineered guide polynucleotide is a dual guide nucleic acid. In some embodiments, the engineered guide polynucleotide is RNA. In some embodiments, the engineered endonuclease binds non-covalently to the engineered guide polynucleotide. In some embodiments, the endonuclease is covalently linked to the engineered guide polynucleotide. In some embodiments, the endonuclease is fused to the engineered guide polynucleotide. In some embodiments, the engineered guide polynucleotide comprises a sequence having at least 90% sequence identity to any one of SEQ ID NOs: 111-113. In some embodiments, the engineered guide polynucleotide comprises a sequence having 100% sequence identity to any one of SEQ ID NOs: 111-113. In some embodiments, the engineered endonuclease is configured to bind to a PAM that comprises any one of SEQ ID NOs: 117 and 2855-2862.

[0052] Described herein, in certain embodiments, are engineered nuclease systems, comprising: a) an engineered endonuclease comprising a sequence having at least 80% sequence identity to any one of SEQ ID NOs: 1-27 and 771-862; and b) an engineered guide polynucleotide configured to form a complex with the endonuclease and comprising a spacer sequence configured to hybridize to at least a portion of a target nucleic acid sequence within an albumin gene or within an intron of an endogenous gene, the engineered guide polynucleotide comprising a sequence having at least 90% sequence identity to any one of SEQ ID NOs: 67-86.

[0053] Described herein, in certain embodiments, are engineered nuclease systems, comprising: a) an engineered endonuclease comprising a sequence having at least 80% sequence identity to any one of SEQ ID NOs: 1-27 and 771-862; and b) an engineered guide polynucleotide configured to form a complex with the endonuclease and comprising a spacer sequence configured to hybridize to at least a portion of a target nucleic acid sequence within a TRAC gene or within an intron of an endogenous gene, the engineered guide polynucleotide comprising a sequence having at least 90% sequence identity to any one of SEQ ID NOs: 119-138, 922-924, 972-991, 1088-1183, 1280-1320, 2390-2485, and 2582-2617. In some embodiments, the target nucleic acid sequence comprises a sequence having at least 90% sequence identity to any one of SEQ ID NOs: 139-158, 925-927, 992-1011, 1184-1279, 1321-1361, 2486-2581, and 2618-2653.

[0054] Described herein, in certain embodiments, are engineered nuclease systems, comprising: a) an engineered endonuclease comprising a sequence having at least 80% sequence identity to any one of SEQ ID NOs: 1-27 and 771-862; and b) an engineered guide polynucleotide configured to form a complex with the endonuclease and comprising a spacer sequence configured to hybridize to at least a portion of a target nucleic acid sequence within a B2M gene or within an intron of an endogenous gene, the engineered guide polynucleotide comprising a sequence having at least 90% sequence identity to any one of SEQ ID NOs: 159-184. In some embodiments, the target nucleic acid sequence comprises a sequence having at least 90% sequence identity to any one of SEQ ID NOs: 185-210.

[0055] Described herein, in certain embodiments, are engineered nuclease systems, comprising: a) an engineered endonuclease comprising a sequence having at least 80% sequence identity to any one of SEQ ID NOs: 1-27 and 771-862; and b) an engineered guide polynucleotide configured to form a complex with the endonuclease and comprising a spacer sequence configured to hybridize to at least a portion of a target nucleic acid sequence within a TRBC1 gene or within an intron of an endogenous gene, the engineered guide polynucleotide comprising a sequence having at least 90% sequence identity to any one of SEQ ID NOs: 211-251. In some embodiments, the target nucleic acid sequence comprises a sequence having at least 90% sequence identity to any one of SEQ ID NOs: 252-292.

[0056] Described herein, in certain embodiments, are engineered nuclease systems, comprising: a) an engineered endonuclease comprising a sequence having at least 80% sequence identity to any one of SEQ ID NOs: 1-27 and 771-862; and b) an engineered guide polynucleotide configured to form a complex with the endonuclease and comprising a spacer sequence configured to hybridize to at least a portion of a target nucleic acid sequence within a TRBC2 gene or within an intron of an endogenous gene, the engineered guide polynucleotide comprising a sequence having at least 90% sequence identity to any one of SEQ ID NOs: 293-337. In some embodiments, the target nucleic acid sequence comprises a sequence having at least 90% sequence identity to any one of SEQ ID NOs: 338-382.

[0057] Described herein, in certain embodiments, are engineered nuclease systems, comprising: a) an engineered endonuclease comprising a sequence having at least 80% sequence identity to any one of SEQ ID NOs: 1-27 and 771-862; and b) an engineered guide polynucleotide configured to form a complex with the endonuclease and comprising a spacer sequence configured to hybridize to at least a portion of a target nucleic acid sequence within an ANGPTL3 gene or within an intron of an endogenous gene, the engineered guide polynucleotide comprising a sequence having at least 90% sequence identity to any one of SEQ ID NOs: 383-477, 1392-1489, 2120-2215, and 2312-2350. In some embodiments, the target nucleic acid sequence comprises a sequence having at least 90% sequence identity to any one of SEQ ID NOs: 478-572, 1490-1587, 2216-2311, and 2351-2389.

[0058] Described herein, in certain embodiments, are engineered nuclease systems, comprising: a) an engineered endonuclease comprising a sequence having at least 80% sequence identity to any one of SEQ ID NOs: 1-27 and 771-862; and b) an engineered guide polynucleotide configured to form a complex with the endonuclease and comprising a spacer sequence configured to hybridize to at least a portion of a target nucleic acid sequence within a PCSK9 gene or within an intron of an endogenous gene, the engineered guide polynucleotide comprising a sequence having at least 90% sequence identity to any one of SEQ ID NOs: 573-587 and 1362-1376. In some embodiments, the target nucleic acid sequence comprises a sequence having at least 90% sequence identity to any one of SEQ ID NOs: 588-602 and 1377-1391.

[0059] Described herein, in certain embodiments, are engineered nuclease systems, comprising: a) an engineered endonuclease comprising a sequence having at least 80% sequence identity to any one of SEQ ID NOs: 1-27 and 771-862; and b) an engineered guide polynucleotide configured to form a complex with the endonuclease and comprising a spacer sequence configured to hybridize to at least a portion of a target nucleic acid sequence within a VCP gene or within an intron of an endogenous gene, the engineered guide polynucleotide comprising a sequence having at least 90% sequence identity to any one of SEQ ID NOs: 723-738 and 755-762. In some embodiments, the target nucleic acid sequence comprises a sequence having at least 90% sequence identity to any one of SEQ ID NOs: 739-754 and 763-770.

[0060] Described herein, in certain embodiments, are engineered nuclease systems, comprising: a) an engineered endonuclease comprising a sequence having at least 80% sequence identity to any one of SEQ ID NOs: 1-27 and 771-862; and b) an engineered guide polynucleotide configured to form a complex with the endonuclease and comprising a spacer sequence configured to hybridize to at least a portion of a target nucleic acid sequence within an AAVS1 locus or within an intron of an endogenous gene, the engineered guide polynucleotide comprising a sequence having at least 90% sequence identity to any one of SEQ ID NOs: 928-949 and 1012-1049. In some embodiments, the target nucleic acid sequence comprises a sequence having at least 90% sequence identity to any one of SEQ ID NOs: 950-971 and 1050-1087.

[0061] Described herein, in certain embodiments, are engineered nuclease systems, comprising: a) an engineered endonuclease comprising a sequence having at least 80% sequence identity to any one of SEQ ID NOs: 1-27 and 771-862; and b) an engineered guide polynucleotide configured to form a complex with the endonuclease and comprising a spacer sequence configured to hybridize to at least a portion of a target nucleic acid sequence within a GPR146 gene or within an intron of an endogenous gene, the engineered guide polynucleotide comprising a sequence having at least 90% sequence identity to any one of SEQ ID NOs: 1588-1656. In some embodiments, the target nucleic acid sequence comprises a sequence having at least 90% sequence identity to any one of SEQ ID NOs: 1657-1725.

[0062] Described herein, in certain embodiments, are engineered nuclease systems, comprising: a) an engineered endonuclease comprising a sequence having at least 80% sequence identity to any one of SEQ ID NOs: 1-27 and 771-862; and b) an engineered guide polynucleotide configured to form a complex with the endonuclease and comprising a spacer sequence configured to hybridize to at least a portion of a target nucleic acid sequence within an APOA1 gene or within an intron of an endogenous gene, the engineered guide polynucleotide comprising a sequence having at least 90% sequence identity to any one of SEQ ID NOs: 1726-1744, 1764-1774, 1866-1961 and 2058-2088. In some embodiments, the target nucleic acid sequence comprises a sequence having at least 90% sequence identity to any one of SEQ ID NOs: 1745-1763, 1775-1785, 1962-2057, and 2089-2119.

[0063] Described herein, in certain embodiments, are engineered nuclease systems, comprising: a) an engineered endonuclease comprising a sequence having at least 80% sequence identity to any one of SEQ ID NOs: 1-27 and 771-862; and b) an engineered guide polynucleotide configured to form a complex with the endonuclease and comprising a spacer sequence configured to hybridize to at least a portion of a target nucleic acid sequence within a HAO1 gene or within an intron of an endogenous gene, the engineered guide polynucleotide comprising a sequence having at least 90% sequence identity to any one of SEQ ID NOs: 611-633, 1789-1826, and 1827-1865.

[0064] Described herein, in certain embodiments, are methods for modifying a target nucleic acid sequence comprising contacting the target nucleic acid sequence using the endonuclease described herein or the engineered nuclease system described herein. In some embodiments, modifying the target nucleic acid sequence comprises binding, nicking, or cleaving, the target nucleic acid sequence. In some embodiments, the target nucleic acid sequence comprises genomic DNA, viral DNA, viral RNA, or bacterial DNA. In some embodiments, the modification is in vitro. In some embodiments, the modification is in vivo. In some embodiments, the modification is ex vivo. In some embodiments, the gRNA is encoded by a sequence having any one of SEQ ID NOs: 251-260, 271-274, and 279-290. In some embodiments, the target nucleic acid sequence comprises a sequence having any one of SEQ ID NOs: 261-270, 275-278, and 291-302.

[0065] Described herein, in certain embodiments, are methods of modifying a target nucleic acid sequence in a mammalian cell comprising contacting the mammalian cell using the endonuclease described herein or the engineered nuclease system described herein. In some embodiments, the method further comprises selecting cells comprising the modification.

[0066] Described herein, in certain embodiments, are methods of modifying an albumin gene comprising contacting the albumin gene using an engineered nuclease system comprising: a) an engineered endonuclease comprising a sequence having at least 80% sequence identity to any one of SEQ ID NOs: 1-27 and 771-862; and b) an engineered guide polynucleotide configured to form a complex with the endonuclease and comprising a spacer sequence configured to hybridize to at least a portion of a target nucleic acid sequence within the albumin gene or within an intron of an endogenous gene, the engineered guide polynucleotide comprising a sequence having at least 90% sequence identity to any one of SEQ ID NOs: 67-86.

[0067] Described herein, in certain embodiments, are methods of modifying a TRAC gene comprising contacting the TRAC gene using an engineered nuclease system comprising: a) an engineered endonuclease comprising a sequence having at least 80% sequence identity to any one of SEQ ID NOs: 1-27 and 771-862; and b) an engineered guide polynucleotide configured to form a complex with the endonuclease and comprising a spacer sequence configured to hybridize to at least a portion of a target nucleic acid sequence within the TRAC gene or within an intron of an endogenous gene, the engineered guide polynucleotide comprising a sequence having at least 90% sequence identity to any one of SEQ ID NOs: 119-138, 922-924, 972-991, 1088-1183, 1280-1320, 2390-2485, and 2582-2617. In some embodiments, the target nucleic acid sequence comprises a sequence having at least 90% sequence identity to any one of SEQ ID NOs: 139-158, 925-927, 992-1011, 1184-1279, 1321-1361, 2486-2581, and 2618-2653.

[0068] Described herein, in certain embodiments, are methods of modifying a B2M gene comprising contacting the B2M gene using an engineered nuclease system comprising: a) an engineered endonuclease comprising a sequence having at least 80% sequence identity to any one of SEQ ID NOs: 1-27 and 771-862; and b) an engineered guide polynucleotide configured to form a complex with the endonuclease and comprising a spacer sequence configured to hybridize to at least a portion of a target nucleic acid sequence within the B2M gene or within an intron of an endogenous gene, the engineered guide polynucleotide comprising a sequence having at least 90% sequence identity to any one of SEQ ID NOs: 159-184. In some embodiments, the target nucleic acid sequence comprises a sequence having at least 90% sequence identity to any one of SEQ ID NOs: 185-210.

[0069] Described herein, in certain embodiments, are methods of modifying a TRBC1 gene comprising contacting the TRBC1 gene using an engineered nuclease system comprising: a) an engineered endonuclease comprising a sequence having at least 80% sequence identity to any one of SEQ ID NOs: 1-27 and 771-862; and b) an engineered guide polynucleotide configured to form a complex with the endonuclease and comprising a spacer sequence configured to hybridize to at least a portion of a target nucleic acid sequence within the TRBC1 gene or within an intron of an endogenous gene, the engineered guide polynucleotide comprising a sequence having at least 90% sequence identity to any one of SEQ ID NOs: 211-251. In some embodiments, the target nucleic acid sequence comprises a sequence having at least 90% sequence identity to any one of SEQ ID NOs: 252-292.

[0070] Described herein, in certain embodiments, are methods of modifying a TRBC2 gene comprising contacting the TRBC2 gene using an engineered nuclease system comprising: a) an engineered endonuclease comprising a sequence having at least 80% sequence identity to any one of SEQ ID NOs: 1-27 and 771-862; and b) an engineered guide polynucleotide configured to form a complex with the endonuclease and comprising a spacer sequence configured to hybridize to at least a portion of a target nucleic acid sequence within the TRBC2 gene or within an intron of an endogenous gene, the engineered guide polynucleotide comprising a sequence having at least 90% sequence identity to any one of SEQ ID NOs: 293-337. In some embodiments, the target nucleic acid sequence comprises a sequence having at least 90% sequence identity to any one of SEQ ID NOs: 338-382.

[0071] Described herein, in certain embodiments, are methods of modifying an ANGPTL3 gene comprising contacting the ANGPTL3 gene using an engineered nuclease system comprising: a) an engineered endonuclease comprising a sequence having at least 80% sequence identity to any one of SEQ ID NOs: 1-27 and 771-862; and b) an engineered guide polynucleotide configured to form a complex with the endonuclease and comprising a spacer sequence configured to hybridize to at least a portion of a target nucleic acid sequence within the ANGPTL3 gene or within an intron of an endogenous gene, the engineered guide polynucleotide comprising a sequence having at least 90% sequence identity to any one of SEQ ID NOs: 383-477, 1392-1489, 2120-2215, and 2312-2350. In some embodiments, the target nucleic acid sequence comprises a sequence having at least 90% sequence identity to any one of SEQ ID NOs: 478-572, 1490-1587, 2216-2311, and 2351-2389.

[0072] Described herein, in certain embodiments, are methods of modifying a PCSK9 gene comprising contacting the PCSK9 gene using an engineered nuclease system comprising: a) an engineered endonuclease comprising a sequence having at least 80% sequence identity to any one of SEQ ID NOs: 1-27 and 771-862; and b) an engineered guide polynucleotide configured to form a complex with the endonuclease and comprising a spacer sequence configured to hybridize to at least a portion of a target nucleic acid sequence within the PCSK9 gene or within an intron of an endogenous gene, the engineered guide polynucleotide comprising a sequence having at least 90% sequence identity to any one of SEQ ID NOs: 573-587 and 1362-1376. In some embodiments, the target nucleic acid sequence comprises a sequence having at least 90% sequence identity to any one of SEQ ID NOs: 588-602 and 1377-1391.

[0073] Described herein, in certain embodiments, are methods of modifying a VCP gene comprising contacting the VCP gene using an engineered nuclease system comprising: a) an engineered endonuclease comprising a sequence having at least 80% sequence identity to any one of SEQ ID NOs: 1-27 and 771-862; and b) an engineered guide polynucleotide configured to form a complex with the endonuclease and comprising a spacer sequence configured to hybridize to at least a portion of a target nucleic acid sequence within the VCP gene or within an intron of an endogenous gene, the engineered guide polynucleotide comprising a sequence having at least 90% sequence identity to any one of SEQ ID NOs: 723-738 and 755-762. In some embodiments, the target nucleic acid sequence comprises a sequence having at least 90% sequence identity to any one of SEQ ID NOs: 739-754 and 763-770.

[0074] Described herein, in certain embodiments, are methods of modifying an AAVS1 locus comprising contacting the AAVS1 locus using an engineered nuclease system comprising: a) an engineered endonuclease comprising a sequence having at least 80% sequence identity to any one of SEQ ID NOs: 1-27 and 771-862; and b) an engineered guide polynucleotide configured to form a complex with the endonuclease and comprising a spacer sequence configured to hybridize to at least a portion of a target nucleic acid sequence within the AAVS1 locus or within an intron of an endogenous gene, the engineered guide polynucleotide comprising a sequence having at least 90% sequence identity to any one of SEQ ID NOs: 928-949 and 1012-1049. In some embodiments, the target nucleic acid sequence comprises a sequence having at least 90% sequence identity to any one of SEQ ID NOs: 950-971 and 1050-1087.

[0075] Described herein, in certain embodiments, are methods of modifying a GPR146 gene comprising contacting the GPR146 gene using an engineered nuclease system comprising: a) an engineered endonuclease comprising a sequence having at least 80% sequence identity to any one of SEQ ID NOs: 1-27 and 771-862; and b) an engineered guide polynucleotide configured to form a complex with the endonuclease and comprising a spacer sequence configured to hybridize to at least a portion of a target nucleic acid sequence within the GPR146 gene or within an intron of an endogenous gene, the engineered guide polynucleotide comprising a sequence having at least 90% sequence identity to any one of SEQ ID NOs: 1588-1656. In some embodiments, the target nucleic acid sequence comprises a sequence having at least 90% sequence identity to any one of SEQ ID NOs: 1657-1725.

[0076] Described herein, in certain embodiments, are methods of modifying an APOA1 gene comprising contacting the APOA1 gene using an engineered nuclease system comprising: a) an engineered endonuclease comprising a sequence having at least 80% sequence identity to any one of SEQ ID NOs: 1-27 and 771-862; and b) an engineered guide polynucleotide configured to form a complex with the endonuclease and comprising a spacer sequence configured to hybridize to at least a portion of a target nucleic acid sequence within the APOA1 gene or within an intron of an endogenous gene, the engineered guide polynucleotide comprising a sequence having at least 90% sequence identity to any one of SEQ ID NOs: 1726-1744, 1764-1774, 1866-1961 and 2058-2088. In some embodiments, the target nucleic acid sequence comprises a sequence having at least 90% sequence identity to any one of SEQ ID NOs: 1745-1763, 1775-1785, 1962-2057, and 2089-2119.

[0077] Described herein, in certain embodiments, are methods of modifying a TRAC gene comprising contacting the TRAC gene using an engineered nuclease system comprising: a) an engineered endonuclease comprising a sequence having at least 80% sequence identity to any one of SEQ ID NOs: 1-27 and 771-862; and b) an engineered guide polynucleotide configured to form a complex with the endonuclease and comprising a spacer sequence configured to hybridize to at least a portion of a target nucleic acid sequence within a HAO1 gene or within an intron of an endogenous gene, the engineered guide polynucleotide comprising a sequence having at least 90% sequence identity to any one of SEQ ID NOs: 611-633, 1789-1826, and 1827-1865.

[0078] Described herein, in certain embodiments, are cells comprising the endonuclease described herein or the engineered nuclease system described herein. In some embodiments, the cell is a eukaryotic cell. In some embodiments, the cell is a mammalian cell. In some embodiments, the cell is an immortalized cell. In some embodiments, the cell is an insect cell. In some embodiments, the cell is a yeast cell. In some embodiments, the cell is a plant cell. In some embodiments, the cell is a fungal cell. In some embodiments, the cell is a prokaryotic cell. In some embodiments, the cell is an A549, HEK-293, HEK-293T, BHK, CHO, HeLa, MRC5, Sf9, Cos-1, Cos-7, Vero, BSC 1, BSC 40, BMT 10, WI38, HeLa, Saos, C2C12, L cell, HT1080, HepG2, Huh7, K562, primary cell, or a derivative thereof. In some embodiments, the cell is an engineered cell. In some embodiments, the cell is a stable cell.

[0079] Additional aspects and advantages of the present disclosure will become readily apparent to those skilled in this art from the following detailed description, wherein only illustrative embodiments of the present disclosure are shown and described. As will be realized, the present disclosure is capable of other and different embodiments, and its several details are capable of modifications in various obvious respects, all without departing from the disclosure. Accordingly, the drawings and description are to be regarded as illustrative in nature, and not as restrictive.

### BRIEF DESCRIPTION OF THE DRAWINGS

[0080] The novel features of the disclosure are set forth with particularity in the appended claims. A better understanding of the features and advantages of the present disclosure will be obtained by reference to the following detailed description that sets forth illustrative embodiments, in which the principles of the disclosure are utilized, and the accompanying drawings (also “Figure” and “FIG.” herein), of which:

[0081] FIGS. 1A-1B depict the natural PAM specificities of various effectors described herein. FIG. 1A shows a phylogenetic tree of the various effectors described herein. FIG. 1B is a table of the PAM specificities of natural RNA guided CRISPR-associated endonucleases.

[0082] FIG. 2 demonstrates the concept of domain swapping between RNA guided CRISPR-associated nucleases.

[0083] FIGS. 3A and 3B depict the alignment of multiple sequences to guide the determination of an optimal breakpoint. FIG. 3A shows SaCas9 and SpCas9 aligned to several proteins described herein and the terminal conserved residue (an alanine residue) of these sequences are identified as the proposed C-terminus of the swapped section. FIG. 3B depicts the C-terminal domain of a SaCas9 protein to be swapped spans of the RuvC-III, WED, TOPO, and CTD domains. The PAM Interaction domain is composed of the TOPO domain and the CTD domain. Active site residues (D10, E477, and H701 of RuvC domain and D556, D557, and N580 of the NHN domain) are not included in the swapped C-terminal domain.

[0084] FIG. 4 depicts the screening of chimeras with an in vitro PAM enrichment assay when recombining MG3-6 with various C-terminal domains from closely and distantly related nucleases. sgRNAs from N-terminal parental domains were used for RNA guided nuclease activities.

[0085] FIGS. 5A-5B depict PAM sequences (FIG. 5A) and Seq Logo depictions of PAM sequences (FIG. 5B) of functional chimeras described herein. Given the breakpoint swapping of predicted C-terminal domains of RuvC-III, WED, TOPO and CTD, chimeras were functional if recombined with closely related nucleases. The engineered chimeras tended to preserve PAM specificities from the natural protein's PAM interacting domains, even if the natural protein was not functional in the same experiment.

[0086] FIG. 6 shows the screening of chimeras with an in vitro PAM enrichment assay with chimeras recombining MG3-6 with various c-terminal domains from closely and distantly related nucleases. sgRNAs from C-terminal parental domains were used for RNA guided nuclease activities. Numbers in parentheses indicate sgRNA species. Using sgRNAs from C-terminal parental domains did not rescue activities.

[0087] FIG. 7 shows predicted structures of MG3-6 and MG15-1. The WED and PI domains of MG3-6 were swapped with those of MG15-1 counterparts to generate chimera 1 (C1). Alternatively, the PI domain of MG3-6 was swapped with MG15-1's counterpart to generate chimera 2 (C2).

[0088] FIGS. 8A-8B depict an in vitro PAM enrichment assay and Sanger sequencing results for PAM specificities. C1: MG3-6+MG15-1(WP) and C2: MG3-6+MG15-1(P). The engineered chimeras tend to preserve PAM specificities from the natural proteins' PAM interacting domains. PAM enrichment assay was performed in triplicate. (FIG. 8A) shows an agarose gel depiction of the assay indicating that sequences were cleaved in the presence of the active enzymes and (FIG. 8B) shows SeqLogo depictions of PAM sequences determined by the assay.

[0089] FIGS. 9A-9B depict the activity of a chimera described herein in mammalian cells. mRNA codifying for the chimera was co-transfected with 20 different sgRNAs (see e.g., SEQ ID Nos: 67-86) into Hepa 1-6 cells. Editing was assessed by Sanger sequencing and Inference of CRISPR edits (ICE). FIG. 9A shows the editing efficiency of the tested guides. Two biological replicates are shown. FIG. 9B shows the indel profiles created by representative guides.

[0090] FIG. 10 depicts the results of a guide screen in Hepa1-6 cells; guides were delivered as mRNA and gRNA using lipofectamine Messenger Max.

[0091] FIG. 11A depicts the structural portion of the MG3-6/3-4 guide (SEQ ID NO: 2925).

[0092] FIG. 11B depicts the structural portion of the MG3-6 guide (SEQ ID NO: 2925).

[0093] FIG. 12 depicts the activity of chemically modified MG3-6/3-4 guides in Hepa1-6 cells when delivered as mRNA and gRNA using lipofectamine Messenger Max.

[0094] FIG. 13 depicts the stability of chemically modified MG3-6/3-4 guides over 9 hours at 37° C.

[0095] FIG. 14 depicts the stability of chemically modified MG3-6/3-4 guides over 21 hours at 37° C.

[0096] FIGS. 15A-15B depict the in vitro screening of Type V-A chimeras. FIG. 15A depicts the agarose gel of amplified cleavage products for each cleavage reaction. Positive enrichment is observed with the MG29-1+MG29-5 chimera, domain swap from the same family (numbers in parentheses indicate sgRNA species). FIG. 15B depicts Seqlogo depictions of PAMs for parent enzymes and the chimeras derived therefrom.

[0097] FIG. 16 depicts the gene-editing outcomes at the DNA level for TRAC in HEK293T cells.

[0098] FIG. 17 depicts the gene-editing outcomes at the DNA level for B2M in HEK293T cells.

[0099] FIG. 18 depicts the gene-editing outcomes at the DNA and phenotypic levels for TRAC in T cells.

[0100] FIG. 19 depicts the gene-editing outcomes at the DNA level for B2M in T cells.

[0101] FIG. 20 depicts the gene-editing outcomes at the phenotypic level for TRBC1 and TRBC2 in T cells.

[0102] FIG. 21 depicts the gene-editing outcomes at the DNA level for ANGPTL3 in Hep3B cells.

[0103] FIG. 22 depicts the gene-editing outcomes at the DNA level for PCSK9 in Hep3B cells.

[0104] FIG. 23 depicts genome editing at the HAO-1 locus by MG3-6/3-4 in wild type mice analyzed by next generation sequencing.

[0105] FIG. 24 depicts glycolate oxidase protein levels in the liver of mice treated with MG3-6/3-4 mRNA and guide RNA targeting the HAO-1 gene.

[0106] FIG. 25 depicts genome editing at the HAO-1 locus in wild type mice treated with MG3-6/3-4 mRNA and guide RNA 7 (G7) targeting HAO-1 with 4 different chemical modifications.

[0107] FIG. 26 depicts Western blot analysis of glycolate oxidase (GO)/HAO-1 protein levels in the liver of mice at 11 days after treatment with LNP encapsulating MG3-6/3-4 mRNA and sgRNA 7 (G7) with 4 different chemical modifications, as described in Example 19. Individual mice are denoted by numbers.

[0108] FIG. 27 depicts the activity of chemically modified guides in Hep3B cells when delivered as mRNA and gRNA using lipid transfection to target HAO-1 as in Example 20.

[0109] FIG. 28 depicts the activity of chemically modified guides in Primary Human Hepatocytes when delivered as mRNA and gRNA using lipid transfection to target HAO-1 as described in Example 21.

[0110] FIG. 29 depicts demonstration of mammalian cell editing and determination of PAM sequences for two MG3-6 chimeric enzymes as assessed in Example 22.

[0111] FIG. 30 depicts the evaluation of MG3-6/3-4 guide chemistries on editing activity in the liver of mice after in vivo delivery in LNP as in Example 23.

[0112] FIG. 31 depicts the gene-editing outcomes at the DNA level for VCP in K562 cells as in Example 24.

[0113] FIG. 32 depicts gene-editing outcomes at the DNA level in K562 cells. Guides were designed to target TRAC and AAVS1. MG3-6_3-3RWP is a chimera swapping partial RuvC-III, WED, and PID of MG3-6 with MG3-3.

[0114] FIG. 33 depicts gene-editing outcomes at the DNA level in K562 cells. Guides were designed to target TRAC and AAVS1. MG3-6_3-7RWP is a chimera swapping partial RuvC-III, WED, and PID of MG3-6 with MG3-7.

[0115] FIG. 34 depicts gene-editing outcomes at the DNA level in K562 cells. Guides were designed to target TRAC. MG3-6_3-8RWP is a chimera swapping partial RuvC-III, WED, and PID of MG3-6 with MG3-8.

[0116] FIG. 35 depicts gene-editing outcomes at the DNA level in K562 cells. Guides were designed to target TRAC. MG3-6_3-8RWP is a chimera swapping partial RuvC-III, WED, and PID of MG3-6 with MG3-8.

[0117] FIG. 36 depicts gene-editing outcomes at the DNA level in human Hep3B cells. Guides were designed to target PCSK9. MG3-6_3-4RWP is a chimera swapping partial RuvC-III, WED, and PID of MG3-6 with MG3-4.

[0118] FIG. 37 depicts gene-editing outcomes at the DNA level in human Hep3B cells. Guides were designed to target ANGPTL3. MG3-6_3-4RWP is a chimera swapping partial RuvC-III, WED, and PID of MG3-6 with MG3-4.

[0119] FIG. 38 depicts gene-editing outcomes at the DNA level human Hep3B cells. Guides were designed to target APOA1. MG3-6_3-8RWP is a chimera swapping partial RuvC-III, WED, and PID of MG3-6 with MG3-8.

[0120] FIG. 39 depicts gene-editing outcomes at the DNA level in mouse Hepa1-6 cells. Guides were designed to target GPR146. MG3-6_3-7RWP is a chimera swapping partial RuvC-III, WED, and PID of MG3-6 with MG3-7RWP.

[0121] FIG. 40 depicts gene-editing outcomes at the DNA level in mouse Hepa1-6 cells. Guides were designed to target APOA1. MG3-6_3-4RWP is a chimera swapping partial RuvC-III, WED, and PID of MG3-6 with MG3-4.

[0122] FIG. 41 depicts the design strategy of MG3-6 chimeras. Panel (a) of FIG. 41 (top left) depicts predicted domain boundaries of MG3-6 and the breakpoint for recombination with MG3 and MG150 members. Panel (b) of FIG. 41 (bottom left) depicts the predicted 3-D structure of MG3-6 and the breakpoint for protein recombination. The structure is predicted by Novafold. Panel (c) of FIG. 41 (right) depicts a multiple sequence alignment (MSA) of MG3 and MG150 members. The breakpoint is indicated with an arrow.

[0123] FIGS. 42A-42B depict screening of MG3-6 chimeras and characterization of PAM specificities. FIG. 42A (left) depicts a DNA agarose gel electrophoresis analysis assessing enzyme activity. FIG. 42B (right) depicts a phylogenetic tree and Seqlogos for functional chimeras.

[0124] FIG. 43 depicts design strategy of MG3-6_3-8 chimeras. Panel (a) of FIG. 43 (top left) depicts predicted domain boundaries of MG3-6_3-8 and the breakpoint for recombination with MG3 and MG150 members. Panel (b) of FIG. 43 (bottom left) depicts predicted 3-D structure of MG3-6 and the breakpoint for protein recombination. The structure is predicted by Novafold. Panel (c) of FIG. 43 (middle) depicts a multiple sequence alignment (MSA) of MG3 and MG150 members. Panel (d) of FIG. 43 (right) depicts a multiple sequence alignment (MSA) of MG15 members. The breakpoints are indicated with arrows.

[0125] FIGS. 44A-44B depict screening of MG3-6_3-8 chimeras and characterization of PAM specificities. FIG. 44A (top) depicts a DNA agarose gel electrophoresis analysis assessing enzyme activity. FIG. 44B (bottom) depicts Seqlogos consensus depictions of PAM sequences for functional chimeras.

[0126] FIG. 45 depicts structures of example cationic lipids that can be used in lipid nanoparticles described herein.

[0127] FIG. 46 depicts the evaluation of MG3-6/3-4 guide chemistries on HAO-1 gene editing and mRNA knockdown activity in the liver of mice after in vivo delivery in LNP as described in Example 28.

[0128] FIG. 47 depicts gene-editing outcomes at the DNA level for mApoa1 in Hepa1-6 cells.

[0129] FIG. 48 depicts gene-editing outcomes at the DNA level for mAngptl3 in Hepa1-6 cells.

[0130] FIG. 49 depicts gene-editing outcomes at the DNA level for mTrac in Hepa1-6 cells.

[0131] FIG. 50 depicts genome editing at the APOA1 and ANGPTL3 loci by MG3-6/3-8 in wild-type mice analyzed by next generation sequencing.

[0132] FIG. 51A depicts a phylogenetic tree of various MG29 effectors described herein.

[0133] FIG. 51B depicts the three-dimensional structure of the MG29-1 effector predicted using Alphafold2. The nucleic acids forming the R-loop are modelled through a structural alignment with Cpf1 (PDB ID: 5XH7). REC, RuvC, and NUC domains are colored in gray, cyan, and pink, respectively. The PAM-interacting domains, i.e. the WED-II, WED-III, and PID domains are colored in yellow and orange, respectively.

[0134] FIG. 52A depicts phylogenetic analysis of Type V-A nucleases. The phylogenetic tree was inferred with RAxML from MAFFT global (g-ins-i) multiple sequence alignments. Ancestral WedII, PI, and WedIII domains were generated for three ancestral nodes (nodes highlighted with a closed circle: MG29-229, MG29-230, and MG29-231). FIG. 52B depicts 3D structure prediction of ancestral domains from MG29-28 vs. the predicted structure of MG29-1. High similarity of these domains is observed by the overlap between the structures (top) as well as conservation of key residues in the sequence alignment (bottom). Important residues involved in PAM binding are indicated by dark boxes above the alignment as well as by stick cartoon visualization in the 3D alignment.

[0135] FIGS. 53A, 53B, and 53C depict multiple sequence alignment of MG29-1 homologs to determine an optimal breakpoint for chimeragenesis. FIG. 53A depicts MG29-1 and FnCas12a aligned to several proteins described herein. The WED-II, PID, and WED-III domains are annotated to highlight the domains being swapped. The dashed lines depict the cut sites to swap these enzyme domains. FIG. 53B: The C-terminal end of MG29-1 protein and its homologs consists of a breakpoint at the edge of REC domain and WED-II domain (SEQ ID NOS: 2926-2937, respectively, in order of appearance). FIG. 53C: The N-terminal end of the MG29-1 protein and its homologs consists of a breakpoint at the edge of WED-III and RuvC domain. Overall, the swapped region spans the WED-II, PID, and WED-III domains (SEQ ID NOS: 2938-2949, respectively, in order of appearance).

[0136] FIG. 54 depicts in vitro screening of Type V-A chimeras. The agarose gel depicts the amplified cleavage products for each cleavage reaction. Positive enrichment was observed for chimeras with MG29-1 and several of its homologs, namely, MG29-13, MG29-14, MG29-16, MG29-20, and MG29-18.

[0137] FIG. 55 depicts in vitro screening of Type V-A ancestral sequences and their corresponding chimeras with MG29-1. The agarose gel depicts the amplified cleavage products for each cleavage reaction. Positive enrichment was observed only for ancestrally reconstructed MG29-230 and MG29-231. However, all the corresponding chimeras were found to be active.

[0138] FIG. 56 depicts PAMs associated with the chimeras derived from MG29-1 and its chimeras.

### BRIEF DESCRIPTION OF THE SEQUENCE LISTING

[0139] The Sequence Listing filed herewith provides example polynucleotide and polypeptide sequences for use in methods, compositions, and systems according to the disclosure. Below are example descriptions of sequences therein.

### MG3-6 Chimeras

[0140] SEQ ID NOs: 1-27 and 771-862 show the full-length peptide sequences of MG3-6 chimeric nucleases.

[0141] SEQ ID NO: 108 shows the nucleotide sequence of an MG3-6/3-4 nuclease containing 5′ UTR, NLS, CDS, NLS, 3′ UTR, and polyA tail.

[0142] SEQ ID NO: 722 shows the nucleotide sequence of a MG3-6/3-4 guide sgRNA scaffold.

[0143] SEQ ID NOs: 28-45, 605-610, 646-695, 863, and 1789-1826 show the nucleotide sequences of sgRNAs engineered to function with an MG3-6 chimeric nuclease.

[0144] SEQ ID NO: 603 shows the DNA coding sequence for MG3-6/3-4.

[0145] SEQ ID NO: 604 shows the protein sequence of the MG3-6/3-4 cassette coding sequence.

### MG29-1 Chimeras

[0146] SEQ ID NOs: 109-110 and 2842-2854 show the full-length peptide sequences of MG29-1 chimeric nucleases.

[0147] SEQ ID NOs: 111-113 show the nucleotide sequences of sgRNAs engineered to function with an MG29-1 chimeric nuclease.

### MG Chimeras

[0148] SEQ ID NO: 696 shows a N-terminal peptide sequence (1-742) of MG3-6.

[0149] SEQ ID NOs: 697-721 show C-terminal peptide sequences.

### Albumin Targeting

[0150] SEQ ID NOs: 67-86 show the nucleotide sequences of sgRNAs engineered to function with an MG3-6/3-4 nuclease in order to target albumin.

### TRAC Targeting

[0151] SEQ ID NOs: 119-138 show the nucleotide sequences of sgRNAs engineered to function with an MG3-6/3-4 nuclease in order to target TRAC.

[0152] SEQ ID NOs: 139-158 show the DNA sequences of TRAC target sites.

[0153] SEQ ID NOs: 922-924 show the nucleotide sequences of sgRNAs engineered to function with an MG3-6/3-3 nuclease in order to target TRAC.

[0154] SEQ ID NOs: 925-927 show the DNA sequences of TRAC target sites.

[0155] SEQ ID NOs: 972-991 show the nucleotide sequences of sgRNAs engineered to function with an MG3-6/3-7 nuclease in order to target TRAC.

[0156] SEQ ID NOs: 992-1011 show the DNA sequences of TRAC target sites.

[0157] SEQ ID NOs: 1088-1183, 1280-1320, 2390-2485, and 2582-2617 show the nucleotide sequences of sgRNAs engineered to function with an MG3-6/3-8 nuclease in order to target TRAC.

[0158] SEQ ID NOs: 1184-1279, 1321-1361, 2486-2581, and 2618-2653 show the DNA sequences of TRAC target sites.

### B2M Targeting

[0159] SEQ ID NOs: 159-184 show the nucleotide sequences of sgRNAs engineered to function with an MG3-6/3-4 nuclease in order to target B2M.

[0160] SEQ ID NOs: 185-210 show the DNA sequences of B2M target sites.

### TRBC1 Targeting

[0161] SEQ ID NOs: 211-251 show the nucleotide sequences of sgRNAs engineered to function with an MG3-6/3-4 nuclease in order to target TRBC1.

[0162] SEQ ID NOs: 252-292 show the DNA sequences of TRBC1 target sites.

### TRBC2 Targeting

[0163] SEQ ID NOs: 293-337 show the nucleotide sequences of sgRNAs engineered to function with an MG3-6/3-4 nuclease in order to target TRBC2.

[0164] SEQ ID NOs: 338-382 show the DNA sequences of TRBC2 target sites.

### ANGPTL3 Targeting

[0165] SEQ ID NOs: 383-477 and 1392-1489 show the nucleotide sequences of sgRNAs engineered to function with an MG3-6/3-4 nuclease in order to target ANGPTL3.

[0166] SEQ ID NOs: 478-572 and 1490-1587 show the DNA sequences of ANGPTL3 target sites.

[0167] SEQ ID NOs: 2120-2215 and 2312-2350 show the nucleotide sequences of sgRNAs engineered to function with an MG3-6/3-8 nuclease in order to target ANGPTL3.

[0168] SEQ ID NOs: 2216-2311 and 2351-2389 show the DNA sequences of ANGPTL3 target sites.

### PCSK9 Targeting

[0169] SEQ ID NOs: 573-587 and 1362-1376 show the nucleotide sequences of sgRNAs engineered to function with an MG3-6/3-4 nuclease in order to target PCSK9.

[0170] SEQ ID NOs: 588-602 and 1377-1391 show the DNA sequences of PCSK9 target sites.

### VCP R155 Targeting

[0171] SEQ ID NOs: 723-738 show the nucleotide sequences of sgRNAs engineered to function with an MG3-6/3-8 nuclease in order to target VCP R155.

[0172] SEQ ID NOs: 739-754 show the DNA sequences of VCPR155 target sites.

[0173] SEQ ID NOs: 755-762 show the nucleotide sequences of sgRNAs engineered to function with an MG3-6/3-4 nuclease in order to target VCP R155.

[0174] SEQ ID NOs: 763-770 show the DNA sequences of VCPR155 target sites.

### AAVS1 Targeting

[0175] SEQ ID NOs: 928-949 show the nucleotide sequences of sgRNAs engineered to function with an MG3-6/3-3 nuclease in order to target AAVS1.

[0176] SEQ ID NOs: 950-971 show the DNA sequences of AAVS1 target sites.

[0177] SEQ ID NOs: 1012-1049 show the nucleotide sequences of sgRNAs engineered to function with an MG3-6/3-7 nuclease in order to target AAVS1.

[0178] SEQ ID NOs: 1050-1087 show the DNA sequences of AAVS1 target sites.

### GPR146 Targeting

[0179] SEQ ID NOs: 1588-1656 show the nucleotide sequences of sgRNAs engineered to function with an MG3-6/3-7 nuclease in order to target M. musculus GPR146.

[0180] SEQ ID NOs: 1657-1725 show the DNA sequences of M. musculus GPR146 target sites.

### APOA1 Targeting

[0181] SEQ ID NOs: 1726-1744 show the nucleotide sequences of sgRNAs engineered to function with an MG3-6/3-4 nuclease in order to target M. musculus APOA1.

[0182] SEQ ID NOs: 1745-1763 show the DNA sequences of M. musculus APOA1 target sites.

[0183] SEQ ID NOs: 1764-1774 show the nucleotide sequences of sgRNAs engineered to function with an MG3-6/3-4 nuclease in order to target H. sapiens APOA1.

[0184] SEQ ID NOs: 1775-1785 show the DNA sequences of H. sapiens APOA1 target sites.

[0185] SEQ ID NOs: 1866-1961 and 2058-2088 show the nucleotide sequences of sgRNAs engineered to function with an MG3-6/3-8 nuclease in order to target mouse APOA1.

[0186] SEQ ID NOs: 1962-2057 and 2089-2119 show the DNA sequences of mouse APOA1 target sites.

### HAO1 Targeting

[0187] SEQ ID NOs: 611-633 and 1789-1826 show the nucleotide sequences of sgRNAs engineered to function with an MG3-6/3-4 nuclease in order to target M. musculus HAO1.

[0188] SEQ ID NOs: 1827-1865 show the nucleotide sequences of sgRNAs engineered to function with an MG3-6/3-4 nuclease in order to target human HAO1.

### Other Sequences

[0189] SEQ ID NOs: 87-102, 118, 634-645, and 1786-1787 show primer sequences

[0190] SEQ ID NOs: 103-107, 920-921, and 1788 show plasmid sequences.

### DETAILED DESCRIPTION

[0191] While various embodiments of the disclosure have been shown and described herein, it will be obvious to those skilled in the art that such embodiments are provided by way of example only. Numerous variations, changes, and substitutions may occur to those skilled in the art without departing from the disclosure. It should be understood that various alternatives to the embodiments of the disclosure described herein may be employed.

[0192] The practice of some methods disclosed herein employ, unless otherwise indicated, techniques of immunology, biochemistry, chemistry, molecular biology, microbiology, cell biology, genomics, and recombinant DNA. See for example Sambrook and Green, Molecular Cloning: A Laboratory Manual, 4th Edition (2012); the series Current Protocols in Molecular Biology (F. M. Ausubel, et al. eds.); the series Methods In Enzymology (Academic Press, Inc.), PCR 2: A Practical Approach (M. J. MacPherson, B. D. Hames and G. R. Taylor eds. (1995)), Harlow and Lane, eds. (1988) Antibodies, A Laboratory Manual, and Culture of Animal Cells: A Manual of Basic Technique and Specialized Applications, 6th Edition (R.I. Freshney, ed. (2010)).

[0193] As used herein, the singular forms “a”, “an” and “the” are intended to include the plural forms as well, unless the context clearly indicates otherwise. Furthermore, to the extent that the terms “including”, “includes”, “having”, “has”, “with”, or variants thereof are used in either the detailed description or the claims, such terms are intended to be inclusive in a manner similar to the term “comprising”.

[0194] The term “about” or “approximately” means within an acceptable error range for the particular value as determined by one of ordinary skill in the art, which will depend in part on how the value is measured or determined, e.g., the limitations of the measurement system. For example, “about” can mean within one or more than one standard deviation, per the practice in the art. Alternatively, “about” can mean a range of up to 20%, up to 15%, up to 10%, up to 5%, or up to 1% of a given value.

[0195] As used herein, a “cell” refers to a biological cell. A cell may be the basic structural, functional, or biological unit of a living organism. A cell may originate from any organism having one or more cells. Some non-limiting examples include: a prokaryotic cell, eukaryotic cell, a bacterial cell, an archaeal cell, a cell of a single-cell eukaryotic organism, a protozoa cell, a cell from a plant (e.g., cells from plant crops, fruits, vegetables, grains, soy bean, corn, maize, wheat, seeds, tomatoes, rice, cassava, sugarcane, pumpkin, hay, potatoes, cotton, Cannabis, tobacco, flowering plants, conifers, gymnosperms, ferns, clubmosses, hornworts, liverworts, mosses), an algal cell, (e.g., Botryococcus braunii, Chlamydomonas reinhardtii, Nannochloropsis gaditana, Chlorella pyrenoidosa, Sargassum patens C. Agardh, and the like), seaweeds (e.g., kelp), a fungal cell (e.g., a yeast cell, a cell from a mushroom), an animal cell, a cell from an invertebrate animal (e.g., fruit fly, cnidarian, echinoderm, nematode, etc.), a cell from a vertebrate animal (e.g., fish, amphibian, reptile, bird, mammal), a cell from a mammal (e.g., a pig, a cow, a goat, a sheep, a rodent, a rat, a mouse, a non-human primate, a human, etc.), and etcetera. Sometimes a cell is not originating from a natural organism (e.g., a cell can be a synthetically made, sometimes termed an artificial cell).

[0196] The term “nucleotide,” as used herein, refers to a base-sugar-phosphate combination. A nucleotide may comprise a synthetic nucleotide. A nucleotide may comprise a synthetic nucleotide analog. Nucleotides may be monomeric units of a nucleic acid sequence (e.g., deoxyribonucleic acid (DNA) and ribonucleic acid (RNA)). The term nucleotide may include ribonucleoside triphosphates adenosine triphosphate (ATP), uridine triphosphate (UTP), cytosine triphosphate (CTP), guanosine triphosphate (GTP) and deoxyribonucleoside triphosphates such as dATP, dCTP, dITP, dUTP, dGTP, dTTP, or derivatives thereof. Such derivatives may include, for example, [αS]dATP, 7-deaza-dGTP and 7-deaza-dATP, and nucleotide derivatives that confer nuclease resistance on the nucleic acid molecule containing them. The term nucleotide as used herein may refer to dideoxyribonucleoside triphosphates (ddNTPs) and their derivatives. Illustrative examples of dideoxyribonucleoside triphosphates may include, but are not limited to, ddATP, ddCTP, ddGTP, ddITP, and ddTTP. A nucleotide may be unlabeled or detectably labeled, such as using moieties comprising optically detectable moieties (e.g., fluorophores). Labeling may also be carried out with quantum dots.

[0197] Detectable labels may include, for example, radioactive isotopes, fluorescent labels, chemiluminescent labels, bioluminescent labels, and enzyme labels. Fluorescent labels of nucleotides may include but are not limited fluorescein, 5-carboxyfluorescein (FAM), 2′7′-dimethoxy-4′5-dichloro-6-carboxyfluorescein (JOE), rhodamine, 6-carboxyrhodamine (R6G), N,N,N′,N′-tetramethyl-6-carboxyrhodamine (TAMRA), 6-carboxy-X-rhodamine (ROX), 4-(4′dimethylaminophenylazo) benzoic acid (DABCYL), Cascade Blue, Oregon Green, Texas Red, Cyanine and 5-(2′-aminoethyl)aminonaphthalene-1-sulfonic acid (EDANS). Specific examples of fluorescently labeled nucleotides can include [R6G]dUTP, [TAMRA]dUTP, [RI10]dCTP, [R6G]dCTP, [TAMRA]dCTP, [JOE]ddATP, [R6G]ddATP, [FAM]ddCTP, [RI10]ddCTP, [TAMRA]ddGTP, [ROX]ddTTP, [dR6G]ddATP, [dR110]ddCTP, [dTAMRA]ddGTP, and [dROX]ddTTP available from Perkin Elmer, Foster City, Calif; FluoroLink DeoxyNucleotides, FluoroLink Cy3-dCTP, FluoroLink Cy5-dCTP, FluoroLink Fluor X-dCTP, FluoroLink Cy3-dUTP, and FluoroLink Cy5-dUTP available from Amersham, Arlington Heights, IL.; Fluorescein-15-dATP, Fluorescein-12-dUTP, Tetramethyl-rodamine-6-dUTP, IR770-9-dATP, Fluorescein-12-ddUTP, Fluorescein-12-UTP, and Fluorescein-15-2′-dATP available from Boehringer Mannheim, Indianapolis, Ind.; and Chromosome Labeled Nucleotides, BODIPY-FL-14-UTP, BODIPY-FL-4-UTP, BODIPY-TMR-14-UTP, BODIPY-TMR-14-dUTP, BODIPY-TR-14-UTP, BODIPY-TR-14-dUTP, Cascade Blue-7-UTP, Cascade Blue-7-dUTP, fluorescein-12-UTP, fluorescein-12-dUTP, Oregon Green 488-5-dUTP, Rhodamine Green-5-UTP, Rhodamine Green-5-dUTP, tetramethylrhodamine-6-UTP, tetramethylrhodamine-6-dUTP, Texas Red-5-UTP, Texas Red-5-dUTP, and Texas Red-12-dUTP available from Molecular Probes, Eugene, Oreg. Nucleotides can also be labeled or marked by chemical modification. A chemically-modified single nucleotide can be biotin-dNTP. Some non-limiting examples of biotinylated dNTPs can include, biotin-dATP (e.g., bio-N6-ddATP, biotin-14-dATP), biotin-dCTP (e.g., biotin-11-dCTP, biotin-14-dCTP), and biotin-dUTP (e.g., biotin-11-dUTP, biotin-16-dUTP, biotin-20-dUTP).

[0198] The terms “polynucleotide,” “oligonucleotide,” and “nucleic acid” are used interchangeably to refer to a polymeric form of nucleotides of any length, either deoxyribonucleotides or ribonucleotides, or analogs thereof, either in single-, double-, or multi-stranded form. A polynucleotide may be exogenous or endogenous to a cell. A polynucleotide may exist in a cell-free environment. A polynucleotide may be a gene or fragment thereof. A polynucleotide may be DNA. A polynucleotide may be RNA. In a polynucleotide when referring to a T, a T means U (Uracil) in RNA and T (Thymine) in DNA. A polynucleotide may have any three-dimensional structure and may perform any function. A polynucleotide may comprise one or more analogs (e.g., altered backbone, sugar, or nucleobase). If present, modifications to the nucleotide structure may be imparted before or after assembly of the polymer. Some non-limiting examples of analogs include: 5-bromouracil, peptide nucleic acid, xeno nucleic acid, morpholinos, locked nucleic acids, glycol nucleic acids, threose nucleic acids, dideoxynucleotides, cordycepin, 7-deaza-GTP, fluorophores (e.g., rhodamine or fluorescein linked to the sugar), thiol-containing nucleotides, biotin-linked nucleotides, fluorescent base analogs, CpG islands, methyl-7-guanosine, methylated nucleotides, inosine, thiouridine, pseudouridine, dihydrouridine, queuosine, and wyosine. Non-limiting examples of polynucleotides include coding or non-coding regions of a gene or gene fragment, loci (locus) defined from linkage analysis, exons, introns, messenger RNA (mRNA), transfer RNA (tRNA), ribosomal RNA (rRNA), short interfering RNA (siRNA), short-hairpin RNA (shRNA), micro-RNA (miRNA), ribozymes, cDNA, recombinant polynucleotides, branched polynucleotides, plasmids, vectors, isolated DNA of any sequence, isolated RNA of any sequence, cell-free polynucleotides including cell-free DNA (cfDNA) and cell-free RNA (cfRNA), nucleic acid probes, and primers. The sequence of nucleotides may be interrupted by non-nucleotide components.

[0199] The terms “transfection” or “transfected” refer to introduction of a nucleic acid into a cell by non-viral or viral-based methods. The nucleic acid molecules may be gene sequences encoding complete proteins or functional portions thereof. See, e.g., Sambrook et al., 1989, Molecular Cloning: A Laboratory Manual, 18.1-18.88.

[0200] The terms “peptide,” “polypeptide,” and “protein” are used interchangeably herein to refer to a polymer of at least two amino acid residues joined by peptide bond(s). This term does not connote a specific length of polymer, nor is it intended to imply or distinguish whether the peptide is produced using recombinant techniques, chemical or enzymatic synthesis, or is naturally occurring. The terms apply to naturally occurring amino acid polymers as well as amino acid polymers comprising at least one modified amino acid. In some cases, the polymer may be interrupted by non-amino acids. The terms include amino acid chains of any length, including full length proteins, and proteins with or without secondary or tertiary structure (e.g., domains). The terms also encompass an amino acid polymer that has been modified, for example, by disulfide bond formation, glycosylation, lipidation, acetylation, phosphorylation, oxidation, and any other manipulation such as conjugation with a labeling component. The terms “amino acid” and “amino acids,” as used herein, refer to natural and non-natural amino acids, including, but not limited to, modified amino acids and amino acid analogues. Modified amino acids may include natural amino acids and non-natural amino acids, which have been chemically modified to include a group or a chemical moiety not naturally present on the amino acid. Amino acid analogues may refer to amino acid derivatives. The term “amino acid” includes both D-amino acids and L-amino acids.

[0201] As used herein, the “non-native” can refer to a nucleic acid or polypeptide sequence that is not found in a native nucleic acid or protein. Non-native may refer to affinity tags. Non-native may refer to fusions. Non-native may refer to a naturally occurring nucleic acid or polypeptide sequence that comprises mutations, insertions, or deletions. A non-native sequence may exhibit or encode for an activity (e.g., enzymatic activity, methyltransferase activity, acetyltransferase activity, kinase activity, ubiquitinating activity, etc.) that may also be exhibited by the nucleic acid or polypeptide sequence to which the non-native sequence is fused. A non-native nucleic acid or polypeptide sequence may be linked to a naturally-occurring nucleic acid or polypeptide sequence (or a variant thereof) by genetic engineering to generate a chimeric nucleic acid or polypeptide sequence encoding a chimeric nucleic acid or polypeptide.

[0202] The term “promoter”, as used herein, refers to the regulatory DNA region which controls transcription or expression of a polynucleotide (e.g., a gene) and which may be located adjacent to or overlapping a nucleotide or region of nucleotides at which RNA transcription is initiated. A promoter may contain specific DNA sequences which bind protein factors, often referred to as transcription factors, which facilitate binding of RNA polymerase to the DNA leading to gene transcription. A “basal promoter”, also referred to as a “core promoter”, may refer to a promoter that contains all the basic necessary elements to promote transcriptional expression of an operably linked polynucleotide. Eukaryotic basal promoters typically, though not necessarily, contain a TATA-box and/or a CAAT box.

[0203] The term “expression”, as used herein, refers to the process by which a nucleic acid sequence or a polynucleotide is transcribed from a DNA template (such as into mRNA or other RNA transcript) or the process by which a transcribed mRNA is subsequently translated into peptides, polypeptides, or proteins. Transcripts and encoded polypeptides may be collectively referred to as “gene product.” If the polynucleotide is derived from genomic DNA, expression may include splicing of the mRNA in a eukaryotic cell.

[0204] As used herein, “operably linked”, “operable linkage”, “operatively linked”, or grammatical equivalents thereof refer to an arrangement of genetic elements, e.g., a promoter, an enhancer, a polyadenylation sequence, etc., wherein an operation (e.g., movement or activation) of a first genetic element has some effect on the second genetic element. The effect on the second genetic element can be, but need not be, of the same type as operation of the first genetic element. For example, two genetic elements are operably linked if movement of the first element causes an activation of the second element. For instance, a regulatory element, which may comprise promoter and/or enhancer sequences, is operatively linked to a coding region if the regulatory element helps initiate transcription of the coding sequence. There may be intervening residues between the regulatory element and coding region so long as this functional relationship is maintained.

[0205] A “vector” as used herein, refers to a macromolecule or association of macromolecules that comprises or associates with a polynucleotide and which may be used to mediate delivery of the polynucleotide to a cell. Examples of vectors include plasmids, viral vectors, liposomes, and other gene delivery vehicles. The vector generally comprises genetic elements, e.g., regulatory elements, operatively linked to a gene to facilitate expression of the gene in a target.

[0206] As used herein, “an expression cassette” and “a nucleic acid cassette” are used interchangeably to refer to a combination of nucleic acid sequences or elements that are expressed together or are operably linked for expression. In some cases, an expression cassette refers to the combination of regulatory elements and a gene or genes to which they are operably linked for expression.

[0207] A “functional fragment” of a DNA or protein sequence refers to a fragment that retains a biological activity (either functional or structural) that is substantially similar to a biological activity of the full-length DNA or protein sequence. A biological activity of a DNA sequence may be its ability to influence expression in a manner attributed to the full-length sequence.

[0208] The terms “engineered,” “synthetic,” and “artificial” are used interchangeably herein to refer to an object that has been modified by human intervention. For example, the terms may refer to a polynucleotide or polypeptide that is non-naturally occurring. An engineered peptide may have, but does not require, low sequence identity (e.g., less than 50% sequence identity, less than 25% sequence identity, less than 10% sequence identity, less than 5% sequence identity, less than 1% sequence identity) to a naturally occurring human protein. For example, VPR and VP64 domains are synthetic transactivation domains. For example, VPR and VP64 domains are synthetic transactivation domains. According to non-limiting examples: a nucleic acid may be modified by changing its sequence to a sequence that does not occur in nature; a nucleic acid may be modified by ligating it to a nucleic acid that it does not associate with in nature such that the ligated product possesses a function not present in the original nucleic acid; an engineered nucleic acid may synthesized in vitro with a sequence that does not exist in nature; a protein may be modified by changing its amino acid sequence to a sequence that does not exist in nature; an engineered protein may acquire a new function or property. An “engineered” system comprises at least one engineered component.

[0209] The term “tracrRNA” or “tracr sequence” means trans-activating CRISPR RNA. tracrRNA interacts with the CRISPR (cr) RNA to form guide (g) RNA in type II and subtype V-B CRISPR-Cas systems. If the tracrRNA is engineered, it may have about 5%, 10%, 20%, 30%, 40%, 50%, 60%, 70%, 80%, 90%, 95%, or 100% sequence identity and/or sequence similarity to a wild type exemplary tracrRNA sequence (e.g., a tracrRNA from S. pyogenes, S. aureus). tracrRNA may refer to a modified form of a tracrRNA that can comprise a nucleotide change such as a deletion, insertion, or substitution, variant, mutation, or chimera. A tracrRNA may refer to a nucleic acid that can be at least about 60% identical to a wild type exemplary tracrRNA (e.g., a tracrRNA from S. pyogenes, S. aureus, etc) sequence over a stretch of at least 6 contiguous nucleotides. For example, a tracrRNA sequence can be at least about 60% identical, at least about 65% identical, at least about 70% identical, at least about 75% identical, at least about 80% identical, at least about 85% identical, at least about 90% identical, at least about 95% identical, at least about 98% identical, at least about 99% identical, or 100% identical to a wild type exemplary tracrRNA (e.g., a tracrRNA from S. pyogenes, S. aureus, etc) sequence over a stretch of at least 6 contiguous nucleotides. Type II tracrRNA sequences can be predicted on a genome sequence by identifying regions with complementarity to part of the repeat sequence in an adjacent CRISPR array.

[0210] As used herein, a “guide nucleic acid” or “guide polynucleotide” refers to a nucleic acid that may hybridize to a target nucleic acid and thereby directs an associated nuclease to the target nucleic acid. A guide nucleic acid may be RNA (guide RNA or gRNA). A guide nucleic acid may be DNA. A guide nucleic acid may be a mixture of RNA and DNA. A guide nucleic acid may comprise a crRNA or a tracrRNA or a combination of both. A guide nucleic acid may be engineered. The guide nucleic acid may be programmed to specifically bind to the target nucleic acid. A portion of the target nucleic acid may be complementary to a portion of the guide nucleic acid. The strand of a double-stranded target polynucleotide that is complementary to and hybridizes with the guide nucleic acid may be called the complementary strand. The strand of the double-stranded target polynucleotide that is complementary to the complementary strand, and therefore may not be complementary to the guide nucleic acid may be called noncomplementary strand. A guide nucleic acid may comprise a polynucleotide chain and can be called a “single guide nucleic acid.” A guide nucleic acid may comprise two polynucleotide chains and may be called a “double guide nucleic acid.” If not otherwise specified, the term “guide nucleic acid” may be inclusive, referring to both single guide nucleic acids and double guide nucleic acids. A guide nucleic acid may comprise a segment that can be referred to as a “nucleic acid-targeting segment” or a “nucleic acid-targeting sequence,” or a “spacer.” A nucleic acid-targeting segment may comprise a sub-segment that may be referred to as a “protein binding segment” or “protein binding sequence” or “Cas protein binding segment.”

[0211] As used herein, the terms “gene editing” and “genome editing” can be used interchangeably. Gene editing or genome editing means to change the nucleic acid sequence of a gene or a genome. Genome editing can include, for example, insertions, deletions, and mutations.

[0212] The term “sequence identity” or “percent identity” in the context of two or more nucleic acids or polypeptide sequences, refers to two (e.g., in a pairwise alignment) or more (e.g., in a multiple sequence alignment) sequences that are the same or have a specified percentage of amino acid residues or nucleotides that are the same, when compared and aligned for maximum correspondence over a local or global comparison window, as measured using a sequence comparison algorithm. Suitable sequence comparison algorithms for polypeptide sequences include, e.g., BLASTP using parameters of a wordlength (W) of 3, an expectation (E) of 10, and the BLOSUM62 scoring matrix setting gap costs at existence of 11, extension of 1, and using a conditional compositional score matrix adjustment for polypeptide sequences longer than 30 residues; BLASTP using parameters of a wordlength (W) of 2, an expectation (E) of 1000000, and the PAM30 scoring matrix setting gap costs at 9 to open gaps and 1 to extend gaps for sequences of less than 30 residues (these are the default parameters for BLASTP in the BLAST suite available at https://blast.ncbi.nlm.nih.gov); CLUSTALW with parameters of; the Smith-Waterman homology search algorithm with parameters of a match of 2, a mismatch of −1, and a gap of −1; MUSCLE with default parameters; MAFFT with parameters retree of 2 and maxiterations of 1000; Novafold with default parameters; HMMER hmmalign with default parameters.

[0213] As used herein, the term “RuvC_III domain” refers to a third discontinuous segment of a RuvC endonuclease domain (the RuvC nuclease domain being comprised of three discontiguous segments, RuvC_I, RuvC_II, and RuvC_III). A RuvC domain or segments thereof can generally be identified by alignment to documented domain sequences, structural alignment to proteins with annotated domains, or by comparison to Hidden Markov Models (HMMs) built based on documented domain sequences (e.g., Pfam HMM PF18541 for RuvC_III).

[0214] As used herein, the term “Wedge” (WED) domain refers to a domain (e.g., present in a Cas protein) interacting primarily with repeat:anti-repeat duplex of the sgRNA and PAM duplex. A WED domain can generally be identified by alignment to documented domain sequences, structural alignment to proteins with annotated domains, or by comparison to Hidden Markov Models (HMMs) built based on documented domain sequences.

[0215] As used herein, the term “PAM interacting domain” or “PI domain” refers to a domain interacting with the protospacer-adjacent motif (PAM) external to the seed sequence in a region targeted by a Cas protein. Examples of PAM-interacting domains include, but are not limited to, Topoisomerase-homology (TOPO) domains and C-terminal domains (CTD) present in Cas proteins. A PAM interacting domain or segments thereof can generally be identified by alignment to documented domain sequences, structural alignment to proteins with annotated domains, or by comparison to Hidden Markov Models (HMMs) built based on documented domain sequences.

[0216] As used herein, the term “REC domain” refers to a domain (e.g., present in a Cas protein) comprising at least one of two segments (REC1 or REC2) that are alpha helical domains thought to contact the guide RNA. A REC domain or segments thereof can generally be identified by alignment to documented domain sequences, structural alignment to proteins with annotated domains, or by comparison to Hidden Markov Models (HMMs) built based on documented domain sequences (e.g., Pfam PF19501 for domain REC1).

[0217] As used herein, the term “BH domain” refers to a domain (e.g., present in a Cas protein) that is a bridge helix between NUC and REC lobes of a Type II Cas enzyme. A BH domain or segments thereof can generally be identified by alignment to documented domain sequences, structural alignment to proteins with annotated domains, or by comparison to Hidden Markov Models (HMMs) built based on documented domain sequences (e.g., Pfam PF16593 for domain BH).

[0218] As used herein, the term “HNH domain” refers to an endonuclease domain having characteristic histidine and asparagine residues. An HNH domain can generally be identified by alignment to documented domain sequences, structural alignment to proteins with annotated domains, or by comparison to Hidden Markov Models (HMMs) built based on documented domain sequences (e.g., Pfam HMM PF01844 for domain HNH).

[0219] Included in the current disclosure are variants of any of the enzymes described herein with one or more conservative amino acid substitutions. Such conservative substitutions can be made in the amino acid sequence of a polypeptide without disrupting the three-dimensional structure or function of the polypeptide. Conservative substitutions can be accomplished by substituting amino acids with similar hydrophobicity, polarity, and R chain length for one another. Additionally or alternatively, by comparing aligned sequences of homologous proteins from different species, conservative substitutions can be identified by locating amino acid residues that have been mutated between species (e.g., non-conserved residues without altering the basic functions of the encoded proteins. Such conservatively substituted variants may include variants with at least about 20%, at least about 25%, at least about 30%, at least about 35%, at least about 40%, at least about 45%, at least about 50%, at least about 55%, at least about 60%, at least about 65%, at least about 70%, at least about 75%, at least about 80%, at least about 85%, at least about 90%, at least about 91%, at least about 92%, at least about 93%, at least about 94%, at least about 95%, at least about 96%, at least about 97%, at least about 98%, or at least about 99% identity any one of the systems described herein. In some embodiments, such conservatively substituted variants are functional variants. Such functional variants can encompass sequences with substitutions such that the activity of critical active site residues of the endonuclease is not disrupted. In some embodiments, a functional variant of any of the systems described herein lack substitution of at least one of the conserved or functional residues described herein. In some embodiments, a functional variant of any of the systems described herein lacks substitution of all of the conserved or functional residues described herein.

[0220] Conservative substitution tables providing functionally similar amino acids are available from a variety of references (see, for example, Creighton, Proteins: Structures and Molecular Properties (W H Freeman & Co.; 2nd Edition (December 1993))). The following eight groups each contain amino acids that are conservative substitutions for one another:
[0221] 1) Alanine (A), Glycine (G);
[0222] 2) Aspartic acid (D), Glutamic acid (E);
[0223] 3) Asparagine (N), Glutamine (Q);
[0224] 4) Arginine (R), Lysine (K);
[0225] 5) Isoleucine (I), Leucine (L), Methionine (M), Valine (V);
[0226] 6) Phenylalanine (F), Tyrosine (Y), Tryptophan (W);
[0227] 7) Serine (S), Threonine (T); and
[0228] 8) Cysteine (C), Methionine (M).

### Overview

[0229] The discovery of new Cas enzymes with unique functionality and structure may offer the potential to further disrupt deoxyribonucleic acid (DNA) editing technologies, improving speed, specificity, functionality, and ease of use. Relative to the predicted prevalence of Clustered Regularly Interspaced Short Palindromic Repeats (CRISPR) systems in microbes and the sheer diversity of microbial species, relatively few functionally characterized CRISPR/Cas enzymes exist in the literature. This is partly because a huge number of microbial species may not be readily cultivated in laboratory conditions. Metagenomic sequencing from natural environmental niches that represent large numbers of microbial species may offer the potential to drastically increase the number of new CRISPR/Cas systems documented and speed the discovery of new oligonucleotide editing functionalities. A recent example of the fruitfulness of such an approach is demonstrated by the 2016 discovery of CasX/CasY CRISPR systems from metagenomic analysis of natural microbial communities.

[0230] CRISPR/Cas systems are RNA-directed nuclease complexes that have been described to function as an adaptive immune system in microbes. In their natural context, CRISPR/Cas systems occur in CRISPR (clustered regularly interspaced short palindromic repeats) operons or loci, which generally comprise two parts: (i) an array of short repetitive sequences (30-40 bp) separated by equally short spacer sequences, which encode the RNA-based targeting element; and (ii) ORFs encoding the Cas encoding the nuclease polypeptide directed by the RNA-based targeting element alongside accessory proteins/enzymes. Efficient nuclease targeting of a particular target nucleic acid sequence may involve both (i) complementary hybridization between the first 6-8 nucleic acids of the target (the target seed) and the crRNA guide; and (ii) the presence of a protospacer-adjacent motif (PAM) sequence within a defined vicinity of the target seed (the PAM usually being a sequence not commonly represented within the host genome). Depending on the exact function and organization of the system, CRISPR-Cas systems are commonly organized into 2 classes, 5 types and 16 subtypes based on shared functional characteristics and evolutionary similarity.

[0231] Class 1 CRISPR-Cas systems have large, multisubunit effector complexes, and comprise Types I, III, and IV.

[0232] Type I CRISPR-Cas systems are considered of moderate complexity in terms of components. In Type I CRISPR-Cas systems, the array of RNA-targeting elements is transcribed as a long precursor crRNA (pre-crRNA) that is processed at repeat elements to liberate short, mature crRNAs that direct the nuclease complex to nucleic acid targets when they are followed by a suitable short consensus sequence called a protospacer-adjacent motif (PAM). This processing occurs via an endoribonuclease subunit (Cas6) of a large endonuclease complex called Cascade, which also comprises a nuclease (Cas3) protein component of the crRNA-directed nuclease complex. Cas I nucleases function primarily as DNA nucleases.

[0233] Type III CRISPR systems may be characterized by the presence of a central nuclease, known as Cas10, alongside a repeat-associated mysterious protein (RAMP) that comprises Csm or Cmr protein subunits. Like in Type I systems, the mature crRNA is processed from a pre-crRNA using a Cas6-like enzyme. Unlike type I and II systems, type III systems appear to target and cleave DNA-RNA duplexes (such as DNA strands being used as templates for an RNA polymerase).

[0234] Type IV CRISPR-Cas systems possess an effector complex that comprises a highly reduced large subunit nuclease (csf1), two genes for RAMP proteins of the Cas5 (csf3) and Cas7 (csf2) groups, and, in some cases, a gene for a predicted small subunit; such systems are commonly found on endogenous plasmids.

[0235] Class 2 CRISPR-Cas systems generally have single-polypeptide multidomain nuclease effectors, and comprise Types II, V and VI.

[0236] Type II CRISPR-Cas systems are considered the simplest in terms of components. In Type II CRISPR-Cas systems, the processing of the CRISPR array into mature crRNAs does not require the presence of a special endonuclease subunit, but rather a small trans-encoded crRNA (tracrRNA) with a region complementary to the array repeat sequence; the tracrRNA interacts with both its corresponding effector nuclease (e.g., Cas9) and the repeat sequence to form a precursor dsRNA structure, which is cleaved by endogenous RNAse III to generate a mature effector enzyme loaded with both tracrRNA and crRNA. Cas II nucleases are documented as DNA nucleases. Type 2 effectors generally exhibit a structure comprising a RuvC-like endonuclease domain that adopts the RNase H fold with an unrelated HNH nuclease domain inserted within the folds of the RuvC-like nuclease domain. The RuvC-like domain is responsible for the cleavage of the target (e.g., crRNA complementary) DNA strand, while the HNH domain is responsible for cleavage of the displaced DNA strand.

[0237] Type V CRISPR-Cas systems are characterized by a nuclease effector (e.g., Cas12) structure similar to that of Type II effectors, comprising a RuvC-like domain. Similar to Type II, most (but not all) Type V CRISPR systems use a tracrRNA to process pre-crRNAs into mature crRNAs; however, unlike Type II systems which requires RNAse III to cleave the pre-crRNA into multiple crRNAs, type V systems are capable of using the effector nuclease itself to cleave pre-crRNAs. Like Type-II CRISPR-Cas systems, Type V CRISPR-Cas systems are again documented as DNA nucleases. Unlike Type II CRISPR-Cas systems, some Type V enzymes (e.g., Cas12a) appear to have a robust single-stranded nonspecific deoxyribonuclease activity that is activated by the first crRNA directed cleavage of a double-stranded target sequence.

[0238] Type VI CRISPR-Cas systems have RNA-guided RNA endonucleases. Instead of RuvC-like domains, the single polypeptide effector of Type VI systems (e.g., Cas13) comprises two HEPN ribonuclease domains. Differing from both Type II and V systems, Type VI systems also appear to, in some embodiments, not require a tracrRNA for processing of pre-crRNA into crRNA. Similar to type V systems, however, some Type VI systems (e.g., C2C2) appear to possess robust single-stranded nonspecific nuclease (ribonuclease) activity activated by the first crRNA directed cleavage of a target RNA.

[0239] Because of their simpler architecture, Class 2 CRISPR-Cas have been most widely adopted for engineering and development as designer nuclease/genome editing applications.

[0240] One of the early adaptations of such a system for in vitro use involved (i) recombinantly-expressed, purified full-length Cas9 (e.g., a Class 2, Type II Cas enzyme) isolated from S. pyogenes SF370, (ii) purified mature ˜42 nt crRNA bearing a ˜20 nt 5′ sequence complementary to the target DNA sequence desired to be cleaved followed by a 3′ tracr-binding sequence (the whole crRNA being in vitro transcribed from a synthetic DNA template carrying a T7 promoter sequence); (iii) purified tracrRNA in vitro transcribed from a synthetic DNA template carrying a T7 promoter sequence, and (iv) Mg²⁺. A later improved, engineered system involved the crRNA of (ii) joined to the 5′ end of (iii) by a linker (e.g., GAAA) to form a single fused synthetic guide RNA (sgRNA) capable of directing Cas9 to a target by itself.

[0241] Such engineered systems can be adapted for use in mammalian cells by providing DNA vectors encoding (i) an ORF encoding codon-optimized Cas9 (e.g., a Class 2, Type II Cas enzyme) under a suitable mammalian promoter with a C-terminal nuclear localization sequence (e.g., SV40 NLS) and a suitable polyadenylation signal (e.g., TK pA signal); and (ii) an ORF encoding an sgRNA (having a 5′ sequence beginning with G followed by 20 nt of a complementary targeting nucleic acid sequence joined to a 3′ tracr-binding sequence, a linker, and the tracrRNA sequence) under a suitable Polymerase III promoter (e.g., the U6 promoter).

### Engineered Endonucleases

[0242] Described herein, in certain embodiments, are engineered endonucleases. In some embodiments, the engineered endonuclease is a chimera of two or more endonucleases. In some embodiments, the engineered endonuclease is a fusion of two or more endonucleases.

[0243] In some embodiments, the engineered endonuclease comprises one or more fragments or domains of a nuclease, such as nucleic acid-guided nuclease. In some embodiments, the engineered endonuclease comprises one or more fragments or domains of a nuclease from orthologs of organisms, genus, species, or other phylogenetic groups described herein. In some embodiments, the engineered endonuclease comprises one or more fragments or domains from nuclease orthologs of different species.

[0244] In some embodiments, the engineered endonuclease comprises one or more fragments or domains from at least two different nucleases. In some embodiments, the engineered endonuclease comprises one or more fragments or domains from at least 2, 3, 4, 5, 6, 7, 8, 9, 10, or more different nucleases. In some embodiments, the engineered endonuclease comprises one or more fragments or domains from at least 2, 3, 4, 5, 6, 7, 8, 9, 10, or more nucleases from different species. In some embodiments, the engineered endonuclease comprises 2 fragments or domains, each from a different nuclease. In some embodiments, the engineered endonuclease comprises 3 fragments or domains, each from a different nuclease. In some embodiments, the engineered endonuclease comprises 4 fragments or domains, each from a different nuclease. In some embodiments, the engineered endonuclease comprises 5 fragments or domains, each from a different nuclease. In some embodiments, the engineered endonuclease comprises 3 fragments or domains, wherein at least one fragment or domain is from a different nuclease. In some embodiments, the engineered endonuclease comprises 4 fragments or domains, wherein at least one fragment or domain is from a different nuclease. In some embodiments, the engineered endonuclease comprises 5 fragments or domains, wherein at least one fragment or domain is from a different nuclease.

[0245] In some embodiments, the engineered endonucleases are functional in prokaryotic or eukaryotic cells for in vitro, in vivo, or ex vivo applications.

[0246] In some embodiments, the endonuclease is derived from an uncultivated microorganism. In some embodiments, the engineered endonuclease is not a Cas9 endonuclease, a Cas14 endonuclease, a Cas12a endonuclease, a Cas12b endonuclease, a Cas 12c endonuclease, a Cas12d endonuclease, a Cas12e endonuclease, a Cas13a endonuclease, a Cas13b endonuclease, a Cas13c endonuclease, or a Cas13d endonuclease. In some embodiments, the engineered endonuclease has less than 86% identity to a SpyCas9 endonuclease.

[0247] In some embodiments, junctions between fragments or domains from different nucleases or species occur in stretches of unstructured regions. Unstructured regions in polynucleotides include, for example, regions that have no predicted secondary structure elements such as alpha helices or beta strands. Unstructured regions may include for example, regions which are exposed within a protein structure, loop regions, or regions that are not conserved within various protein orthologs as predicted by sequence or structural alignments.

[0248] Described herein, in certain embodiments, are engineered endonucleases (e.g., chimeric endonucleases or fusion endonucleases) comprising an N-terminal portion comprising a sequence having at least 55%, at least 60%, at least 65%, at least 70%, at least 75%, at least 80%, at least 81%, at least 82%, at least 83%, at least 84%, at least 85%, at least 86%, at least 87%, at least 88%, at least 89%, at least 90%, at least 91%, at least 92%, at least 93%, at least 94%, at least 95%, at least 96%, at least 97%, at least 98%, or at least 99% sequence identity to SEQ ID NO: 696; and a C-terminal portion comprising a sequence having at least 55%, at least 60%, at least 65%, at least 70%, at least 75%, at least 80%, at least 81%, at least 82%, at least 83%, at least 84%, at least 85%, at least 86%, at least 87%, at least 88%, at least 89%, at least 90%, at least 91%, at least 92%, at least 93%, at least 94%, at least 95%, at least 96%, at least 97%, at least 98%, or at least 99% sequence identity to any one of SEQ ID NOs: 697-721. In some embodiments, the engineered endonuclease comprises an N-terminal portion comprising a sequence having at least about 70% identity to SEQ ID NO: 696 and a C-terminal portion comprising a sequence having at least about 70% identity to any one of SEQ ID NOs: 697-721. In some embodiments, the engineered endonuclease comprises an N-terminal portion comprising a sequence having at least about 75% identity to SEQ ID NO: 696 and a C-terminal portion comprising a sequence having at least about 75% identity to any one of SEQ ID NOs: 697-721. In some embodiments, the engineered endonuclease comprises an N-terminal portion comprising a sequence having at least about 80% identity to SEQ ID NO: 696 and a C-terminal portion comprising a sequence having at least about 80% identity to any one of SEQ ID NOs: 697-721. In some embodiments, the engineered endonuclease comprises an N-terminal portion comprising a sequence having at least about 85% identity to SEQ ID NO: 696 and a C-terminal portion comprising a sequence having at least about 85% identity to any one of SEQ ID NOs: 697-721. In some embodiments, the engineered endonuclease comprises an N-terminal portion comprising a sequence having at least about 90% identity to SEQ ID NO: 696 and a C-terminal portion comprising a sequence having at least about 90% identity to any one of SEQ ID NOs: 697-721. In some embodiments, the engineered endonuclease comprises an N-terminal portion comprising a sequence having at least about 95% identity to SEQ ID NO: 696 and a C-terminal portion comprising a sequence having at least about 95% identity to any one of SEQ ID NOs: 697-721. In some embodiments, the engineered endonuclease comprises an N-terminal portion comprising a sequence having at least about 96% identity to SEQ ID NO: 696 and a C-terminal portion comprising a sequence having at least about 96% identity to any one of SEQ ID NOs: 697-721. In some embodiments, the engineered endonuclease comprises an N-terminal portion comprising a sequence having at least about 97% identity to SEQ ID NO: 696 and a C-terminal portion comprising a sequence having at least about 97% identity to any one of SEQ ID NOs: 697-721. In some embodiments, the engineered endonuclease comprises an N-terminal portion comprising a sequence having at least about 98% identity to SEQ ID NO: 696 and a C-terminal portion comprising a sequence having at least about 98% identity to any one of SEQ ID NOs: 697-721. In some embodiments, the engineered endonuclease comprises an N-terminal portion comprising a sequence having at least about 99% identity to SEQ ID NO: 696 and a C-terminal portion comprising a sequence having at least about 99% identity to any one of SEQ ID NOs: 697-721. In some embodiments, the engineered endonuclease comprises an N-terminal portion comprising a sequence having 100% identity to SEQ ID NO: 696 and a C-terminal portion comprising a sequence having 100% identity to any one of SEQ ID NOs: 697-721.

[0249] Described herein, in certain embodiments, are engineered endonucleases (e.g., chimeric endonucleases or fusion endonucleases) comprising an N-terminal portion comprising RuvC, REC, or HNH domains of a Cas endonuclease and having at least 55%, at least 60%, at least 65%, at least 70%, at least 75%, at least 80%, at least 81%, at least 82%, at least 83%, at least 84%, at least 85%, at least 86%, at least 87%, at least 88%, at least 89%, at least 90%, at least 91%, at least 92%, at least 93%, at least 94%, at least 95%, at least 96%, at least 97%, at least 98%, or at least 99% sequence identity to SEQ ID NO: 696; and a C-terminal portion comprising WED, TOPO, or CTD domains of a Cas endonuclease and having at least 55% at least 60%, at least 65%, at least 70%, at least 75%, at least 80%, at least 81%, at least 82%, at least 83%, at least 84%, at least 85%, at least 86%, at least 87%, at least 88%, at least 89%, at least 90%, at least 91%, at least 92%, at least 93%, at least 94%, at least 95%, at least 96%, at least 97%, at least 98%, or at least 99% sequence identity to any one of SEQ ID NOs: 697-721.

[0250] In some embodiments, the N-terminal portion of the engineered endonuclease comprises a RuvC domain, a REC domain, an HNH domain, a BH domain, or combinations thereof. In some embodiments, the C-terminal portion of the engineered endonuclease comprises a WED domain, TOPO domain, CTD domain, a PAM-interacting domain, or combinations thereof. In some embodiments, the N-terminal portion of the engineered endonuclease comprises RuvC, REC, and HNH domains. In some embodiments, the N-terminal portion of the engineered endonuclease comprises RuvC and HNH domains. In some embodiments, the N-terminal portion of the engineered endonuclease further comprises RuvC, REC, HNH, RuvC-I, BH, and RuvC-II domains. In some embodiments, the C-terminal portion of the engineered endonuclease comprises WED, TOPO, and CTD domains.

[0251] In some embodiments, the C-terminal portion of the engineered endonuclease comprises a PAM-interacting domain.

[0252] In some embodiments, the N-terminal portion of the engineered endonuclease and the C-terminal portion of the engineered endonuclease do not naturally occur together in a same reading frame. In some embodiments, the N-terminal portion of the engineered endonuclease and the C-terminal portion of the engineered endonuclease are derived from different organisms.

[0253] In some embodiments, the N-terminal portion of the engineered endonuclease and the C-terminal portion of the engineered endonuclease are fused directly. In some embodiments, the N-terminal portion of the engineered endonuclease and the C-terminal portion of the engineered endonuclease are joined by a linker. In some embodiments, the linker is a glycine and/or serine-rich linker, a large protein domain, a long helix structure, or a short helix structure. In some embodiments, the linker is (G4S)n, and wherein n is an integer from 1 to 20 (SEQ ID NO: 2950). In some embodiments, the linker is GGGGS (SEQ ID NO: 2864). In some embodiments, the linker comprises a sequence selected from the group consisting of (GS)n (SEQ ID NO: 2951), (G2S)n (SEQ ID NO: 2952), (G3S)n (SEQ ID NO: 2953), (G4S)n (SEQ IDS NO: 2950), and (G)n (SEQ ID NO: 2954), and wherein n is an integer from 1 to 20. In some embodiments, the one or more linkers comprises a sequence selected from the group consisting of (GGSGGD)n (SEQ ID NO: 2955) or (GGSGGE)n (SEQ ID NO: 2956), and wherein n is an integer from 1 to 6. In some embodiments, the one or more linkers comprises a sequence selected from the group consisting of (GGGSGGG)n (SEQ ID NO: 2957), (GGGSGSGGGGS)n (SEQ ID NO: 2958) and (GGGGGPGGGGP)n (SEQ ID NO: 2959), and wherein n is an integer from 1 to 3. In some embodiments, the one or more linkers comprises a sequence selected from the group consisting of (GX)n, (GGX)n, (GGGX)n, (GGGGX)n, and (GzX)n, wherein z is between 1 and 20, and wherein n is at least 8. In some embodiments, X is serine, aspartic acid, glutamic acid, threonine, or proline.

[0254] In some embodiments, the engineered endonuclease (e.g., chimeric endonuclease or fusion endonuclease) comprises a sequence having at least 55%, at least 60%, at least 65%, at least 70%, at least 75%, at least 80%, at least 81%, at least 82%, at least 83%, at least 84%, at least 85%, at least 86%, at least 87%, at least 88%, at least 89%, at least 90%, at least 91%, at least 92%, at least 93%, at least 94%, at least 95%, at least 96%, at least 97%, at least 98%, or at least 99% sequence identity sequence identity to any one of SEQ ID NOs: 1-27 and 771-862. In some embodiments, the engineered endonuclease comprises a sequence having at least about 70% identity to any one of SEQ ID NOs: 1-27 and 771-862. In some embodiments, the engineered endonuclease comprises a sequence having at least about 75% identity to any one of SEQ ID NOs: 1-27 and 771-862. In some embodiments, the engineered endonuclease comprises a sequence having at least about 80% identity to any one of SEQ ID NOs: 1-27 and 771-862. In some embodiments, the engineered endonuclease comprises a sequence having at least about 85% identity to any one of SEQ ID NOs: 1-27 and 771-862. In some embodiments, the engineered endonuclease comprises a sequence having at least about 90% identity to any one of SEQ ID NOs: 1-27 and 771-862. In some embodiments, the engineered endonuclease comprises a sequence having at least about 95% identity to any one of SEQ ID NOs: 1-27 and 771-862. In some embodiments, the engineered endonuclease comprises a sequence having at least about 96% identity to any one of SEQ ID NOs: 1-27 and 771-862. In some embodiments, the engineered endonuclease comprises a sequence having at least about 97% identity to any one of SEQ ID NOs: 1-27 and 771-862. In some embodiments, the engineered endonuclease comprises a sequence having at least about 98% identity to any one of SEQ ID NOs: 1-27 and 771-862. In some embodiments, the engineered endonuclease comprises a sequence having at least about 99% identity to any one of SEQ ID NOs: 1-27 and 771-862. In some embodiments, the engineered endonuclease comprises a sequence having 100% identity to any one of SEQ ID NOs: 1-27 and 771-862.

[0255] In some embodiments, the engineered endonuclease described herein have natural PAM specificities (see FIG. 1B). In some embodiments, the present disclosure provides for the enablement of PAM specificity by protein engineering. In some embodiments, the enablement of PAM specificity is achieved by the domain swapping of RNA guided CRISPR-associated nucleases (see FIG. 2). In some embodiments, there is an optimal breakpoint in the process of domain swapping and recombination. In some embodiments, the optimal breakpoint is guided by the alignment of multiple sequences described herein (see FIG. 3A).

[0256] In some embodiments, the engineered endonuclease is configured to bind to a PAM that is not nnRGGnT. In some embodiments, the engineered endonuclease is configured to bind to a PAM in Table 1A. In some embodiments, the engineered endonuclease is configured to bind to a PAM comprising a sequence of any one of nnRGGnT, nnnmtY, nnnCCCy, nnraww, nnRnYAY, nnnctC, nnRGGTY, nnRGGTY, nnnctC, nnRnYAY, nnnMWTY, nnrRTwy, nnRRTWY, nyrnwYY, nnrCyY, nnncMMc, nnrnYCC, nnncMMc, nnrRnCm, nnnYCMw, nnnmCmC, nnrnynnn, nnnmCm, nnRnYCYr, nnRAYAC, nnnmCm, nnnRMYT, nnTYCm, nnTMCy, nnrMTCr, nnnmCCY, nnrmww, nnrRkyY, nnRnYhy, nnnmwTY, nnnmyY, nnRnYhY, nnnmhTY, nnRMAC, nnrRtwy, nnrwwYY, nnrmyY, nnrwYCC, nnRGnCr, nnnMhYy, nnyCCMww, nnnMCMCw, nnRwYhWw, nnRrYCYr, nnrwyhh, ntrMCm, nnrwyhh, nnRRTWY, ntTYCM, nnTCCC, nnrnyhh, nnnCCCYR, nnRnYAYn, nnRRnnYn, and nnRRnnYn. In some embodiments, the engineered endonuclease is configured to bind to a PAM by recognizing the PAM sequence. In some embodiments, the engineered endonuclease recognizes and binds a PAM sequence.

TABLE 1A
PAM Sequences

| Category | Description | Type | Organism | Sequence |
|---|---|---|---|---|
| MG3-6 | MG3-6 | nucleotide | artificial | nnRGGnT |
| | PAM | | sequence | |
| MG3-6 chimera | MG3-6_3-2 | nucleotide | artificial | nnnmtY |
| PAM | PAM | | sequence | |
| MG3-6 chimera | MG3-6_3-3 | nucleotide | artificial | nnnCCCy |
| PAM | PAM | | sequence | |
| MG3-6 chimera | MG3-6_3-3 | nucleotide | artificial | nnnCCCYR |
| PAM | PAM | | sequence | |
| MG3-6 chimera | MG3-6_3-4 | nucleotide | artificial | nnraww |
| PAM | PAM | | sequence | |
| MG3-6 chimera | MG3-6_3-7 | nucleotide | artificial | nnRnYAY |
| PAM | PAM | | sequence | |
| MG3-6 chimera | MG3-6_3-7 | nucleotide | artificial | nnRnYAYn |
| PAM | PAM | | sequence | |
| MG3-6 chimera | MG3-6_3-7 | nucleotide | artificial | nnnctC |
| PAM | PAM | | sequence | |
| MG3-6 chimera | MG3-6_3-8 | nucleotide | artificial | nnRGGTY |
| PAM | PAM | | sequence | |
| MG3-6 chimera | MG3-6_3-8 | nucleotide | artificial | nnRRnnYn |
| PAM | PAM | | sequence | |
| MG3-6 chimera | MG3-6_3- | nucleotide | artificial | nnRGGTY |
| PAM | 18 PAM | | sequence | |
| MG3-6 chimera | MG3-6_3- | nucleotide | artificial | nnnctC |
| PAM | 22 PAM | | sequence | |
| MG3-6 chimera | MG3-6_3- | nucleotide | artificial | nnRnYAY |
| PAM | 24 PAM | | sequence | |
| MG3-6 chimera | MG3-6_3- | nucleotide | artificial | nnnMWTY |
| PAM | 38 PAM | | sequence | |
| MG3-6 chimera | MG3-6_3- | nucleotide | artificial | nnrRTwy |
| PAM | 42 PAM | | sequence | |
| MG3-6 chimera | MG3-6_3- | nucleotide | artificial | nnRRTWY |
| PAM | 78 PAM | | sequence | |
| MG3-6 chimera | MG3-6_3- | nucleotide | artificial | nyrnwYY |
| PAM | 89 PAM | | sequence | |
| MG3-6 chimera | MG3-6_3- | nucleotide | artificial | nnrCyY |
| PAM | 90 PAM | | sequence | |
| MG3-6 chimera | MG3-6_3- | nucleotide | artificial | nnncMMc |
| PAM | 91 PAM | | sequence | |
| MG3-6 chimera | MG3-6_3- | nucleotide | artificial | nnrnYCC |
| PAM | 91 PAM | | sequence | |
| MG3-6 chimera | MG3-6_3- | nucleotide | artificial | nnncMMc |
| PAM | 93 PAM | | sequence | |
| MG3-6 chimera | MG3-6_3- | nucleotide | artificial | nnrRnCm |
| PAM | 94 PAM | | sequence | |
| MG3-6 chimera | MG3-6_3- | nucleotide | artificial | nnnYCMw |
| PAM | 94 PAM | | sequence | |
| MG3-6 chimera | MG3-6_3- | nucleotide | artificial | nnnmCmC |
| PAM | 95 PAM | | sequence | |
| MG3-6 chimera | MG3-6_3- | nucleotide | artificial | nnrnynnn |
| PAM | 96 PAM | | sequence | |
| MG3-6 chimera | MG3-6_3- | nucleotide | artificial | nnnmCm |
| PAM | 101 PAM | | sequence | |
| MG3-6 chimera | MG3-6_3- | nucleotide | artificial | nnRnYCYr |
| PAM | 103 PAM | | sequence | |
| MG3-6 chimera | MG3-6_3- | nucleotide | artificial | nnRAYAC |
| PAM | 104 PAM | | sequence | |
| MG3-6 chimera | MG3-6_3- | nucleotide | artificial | nnnmCm |
| PAM | 150-1 PAM | | sequence | |
| MG3-6 chimera | MG3-6_3- | nucleotide | artificial | nnnRMYT |
| PAM | 150-6 PAM | | sequence | |
| MG3-6 chimera | MG3-6_3- | nucleotide | artificial | nnTYCm |
| PAM | 150-7 PAM | | sequence | |
| MG3-6 chimera | MG3-6_3- | nucleotide | artificial | nnTMCy |
| PAM | 150-8 PAM | | sequence | |
| MG3-6_3-8 | MG3-6_3- | nucleotide | artificial | nnrMTCr |
| chimera PAM | 8_3-2 PAM | | sequence | |
| MG3-6_3-8 | MG3-6_3- | nucleotide | artificial | nnnmCCY |
| chimera PAM | 8_3-3 PAM | | sequence | |
| MG3-6_3-8 | MG3-6_3- | nucleotide | artificial | nnrmww |
| chimera PAM | 8_3-4 PAM | | sequence | |
| MG3-6_3-8 | MG3-6_3- | nucleotide | artificial | nnrRkyY |
| chimera PAM | 8_3-6 PAM | | sequence | |
| MG3-6_3-8 | MG3-6_3- | nucleotide | artificial | nnRnYhy |
| chimera PAM | 8_3-7 PAM | | sequence | |
| MG3-6_3-8 | MG3-6_3- | nucleotide | artificial | nnnmwTY |
| chimera PAM | 8_3-18 | | sequence | |
| | PAM | | | |
| MG3-6_3-8 | MG3-6_3- | nucleotide | artificial | nnnmy Y |
| chimera PAM | 8_3-22 | | sequence | |
| | PAM | | | |
| MG3-6_3-8 | MG3-6_3- | nucleotide | artificial | nnRnYhY |
| chimera PAM | 8_3-24 | | sequence | |
| | PAM | | | |
| MG3-6_3-8 | MG3-6_3- | nucleotide | artificial | nnnmhTY |
| chimera PAM | 8 3-38 | | sequence | |
| | PAM | | | |
| MG3-6_3-8 | MG3-6_3- | nucleotide | artificial | nnRMAC |
| chimera PAM | 8_3-42 | | sequence | |
| | PAM | | | |
| MG3-6_3-8 | MG3-6_3- | nucleotide | artificial | nnrRtwy |
| chimera PAM | 8_3-78 | | sequence | |
| | PAM | | | |
| MG3-6_3-8 | MG3-6_3- | nucleotide | artificial | nnrwwYY |
| chimera PAM | 8_3-89 | | sequence | |
| | PAM | | | |
| MG3-6_3-8 | MG3-6_3- | nucleotide | artificial | nnrmyY |
| chimera PAM | 8_3-90 | | sequence | |
| | PAM | | | |
| MG3-6_3-8 | MG3-6_3- | nucleotide | artificial | nnrwYCC |
| chimera PAM | 8_3-91 | | sequence | |
| | PAM | | | |
| MG3-6_3-8 | MG3-6_3- | nucleotide | artificial | nnRGnCr |
| chimera PAM | 8_3-92 | | sequence | |
| | PAM | | | |
| MG3-6_3-8 | MG3-6_3- | nucleotide | artificial | nnnMhYy |
| chimera PAM | 8_3-93 | | sequence | |
| | PAM | | | |
| MG3-6_3-8 | MG3-6_3- | nucleotide | artificial | nnyCCMww |
| chimera PAM | 8_3-94 | | sequence | |
| | PAM | | | |
| MG3-6_3-8 | MG3-6_3- | nucleotide | artificial | nnnMCMCw |
| chimera PAM | 8_3-95 | | sequence | |
| | PAM | | | |
| MG3-6_3-8 | MG3-6_3- | nucleotide | artificial | nnRwYhWw |
| chimera PAM | 8_3-96 | | sequence | |
| | PAM | | | |
| MG3-6_3-8 | MG3-6_3- | nucleotide | artificial | nnRrYCYr |
| chimera PAM | 8_3-103 | | sequence | |
| | PAM | | | |
| MG3-6_3-8 | MG3-6_3- | nucleotide | artificial | nnrwyhh |
| chimera PAM | 8_3-104 | | sequence | |
| | PAM | | | |
| MG3-6_3-8 | MG3-6_3- | nucleotide | artificial | ntrMCm |
| chimera PAM | 8_3-150-1 | | sequence | |
| | PAM | | | |
| MG3-6_3-8 | MG3-6_3- | nucleotide | artificial | nnrwyhh |
| chimera PAM | 8_3-150-2 | | sequence | |
| | PAM | | | |
| MG3-6_3-8 | MG3-6_3- | nucleotide | artificial | nnRRTWY |
| chimera PAM | 8_3-150-3 | | sequence | |
| | PAM | | | |
| MG3-6_3-8 | MG3-6_3- | nucleotide | artificial | ntTYCM |
| chimera PAM | 8_3-150-7 | | sequence | |
| | PAM | | | |
| MG3-6_3-8 | MG3-6_3- | nucleotide | artificial | nnTCCC |
| chimera PAM | 8_3-150-8 | | sequence | |
| | PAM | | | |
| MG3-6_3-8 | MG3-6_3- | nucleotide | artificial | nnrnyhh |
| chimera PAM | 8_3-150-9 | | sequence | |
| | PAM | | | |
| MG29-1 | MG29- | nucleic acid | artificial | TTTn |
| chimera PAM | 1_29-13 | | sequence | |
| sequence | PAM | | | |
| MG29-1 | MG29- | nucleic acid | artificial | TYYn |
| chimera PAM | 1_29-14 | | sequence | |
| sequence | PAM | | | |
| MG29-1 | MG29- | nucleic acid | artificial | TTTn |
| chimera PAM | 1_29-16 | | sequence | |
| sequence | PAM | | | |
| MG29-1 | MG29- | nucleic acid | artificial | nYTn |
| chimera PAM | 1_29-18 | | sequence | |
| sequence | PAM | | | |
| MG29-1 | MG29- | nucleic acid | artificial | TTYn |
| chimera PAM | 1_29-20 | | sequence | |
| sequence | PAM | | | |
| MG29-1 | MG29- | nucleic acid | artificial | nTTn |
| chimera PAM | 1_29-229 | | sequence | |
| sequence | PAM | | | |
| MG29-1 | MG29- | nucleic acid | artificial | nYYn |
| chimera PAM | 1_29-230 | | sequence | |
| sequence | PAM | | | |
| MG29-1 | MG29- | nucleic acid | artificial | nYYn |
| chimera PAM | 1 29-231 | | sequence | |
| sequence | PAM | | | |
| MG3-6 chimera | MG3-6_3-8 | nucleic acid | artificial | nnRRnnYn |
| PAM sequence | PAM | | sequence | |

[0257] In some embodiments, the engineered endonuclease (e.g., chimeric endonuclease or fusion endonuclease) comprises sequence having at least 55%, at least 60%, at least 65%, at least 70%, at least 75%, at least 80%, at least 81%, at least 82%, at least 83%, at least 84%, at least 85%, at least 86%, at least 87%, at least 88%, at least 89%, at least 90%, at least 91%, at least 92%, at least 93%, at least 94%, at least 95%, at least 96%, at least 97%, at least 98%, or at least 99% sequence identity to any one of SEQ ID NOs: 109-110 and 2842-2854. In some embodiments, the engineered endonuclease comprises a sequence having at least about 70% identity to any one of SEQ ID NOs: 109-110 and 2842-2854. In some embodiments, the engineered endonuclease comprises a sequence having at least about 75% identity to any one of SEQ ID NOs: 109-110 and 2842-2854. In some embodiments, the engineered endonuclease comprises a sequence having at least about 80% identity to any one of SEQ ID NOs: 109-110 and 2842-2854. In some embodiments, the engineered endonuclease comprises a sequence having at least about 85% identity to any one of SEQ ID NOs: 109-110 and 2842-2854. In some embodiments, the engineered endonuclease comprises a sequence having at least about 90% identity to any one of SEQ ID NOs: 109-110 and 2842-2854. In some embodiments, the engineered endonuclease comprises a sequence having at least about 95% identity to any one of SEQ ID NOs: 109-110 and 2842-2854. In some embodiments, the engineered endonuclease comprises a sequence having at least about 96% identity to any one of SEQ ID NOs: 109-110 and 2842-2854. In some embodiments, the engineered endonuclease comprises a sequence having at least about 97% identity to any one of SEQ ID NOs: 109-110 and 2842-2854. In some embodiments, the engineered endonuclease comprises a sequence having at least about 98% identity to any one of SEQ ID NOs: 109-110 and 2842-2854. In some embodiments, the engineered endonuclease comprises a sequence having at least about 99% identity to any one of SEQ ID NOs: 109-110 and 2842-2854. In some embodiments, the engineered endonuclease comprises a sequence having 100% identity to any one of SEQ ID NOs: 109-110 and 2842-2854.

[0258] In some embodiments, the engineered endonuclease is configured to bind to a PAM that is not nnRGGnT. In some embodiments, the engineered endonuclease is configured to bind to a PAM in Table 1A. In some embodiments, the engineered endonuclease is configured to bind to a PAM that comprises any one of TTTn, TYYn, TTTn, nYTn, TTYn, nTTn, nYYn, and nYYn. In some embodiments, the engineered endonuclease is configured to bind to a PAM by recognizing the PAM sequence. In some embodiments, the engineered endonuclease recognizes and binds a PAM sequence.

### Guide Polynucleotides

[0259] Disclosed herein, in certain embodiments, are endonuclease systems comprising (a) an engineered nuclease disclosed herein, and (b) a guide polynucleotide e.g., a guide ribonucleic acid (gRNA), a single gRNA, or a dual guide RNA. In a polynucleotide when referring to a T, a T means U (Uracil) in RNA and T (Thymine) in DNA.

[0260] In some embodiments, the engineered guide polynucleotide is configured to form a complex with the engineered endonuclease. In some cases, the engineered guide polynucleotide comprises a spacer sequence. In some cases, the spacer sequence is configured to hybridize to a target nucleic acid sequence. In some cases, the endonuclease is configured to bind to a protospacer adjacent motif (PAM) sequence.

[0261] In some embodiments, the guide polynucleotide (e.g., gRNA) targets a gene or locus in a cell. In some embodiments, the guide polynucleotide targets a gene or locus in a mammalian cell. In some embodiments, the mammalian cell is a pig, a cow, a goat, a sheep, a rodent, a rat, a mouse, a non-human primate, or a human cell. In some embodiments, the target gene or target locus is albumin, TRAC, B2M, TRBC1, TRBC2, ANGPTL3, PCSK9, VCP R155, AAVS1, GPR146, APOA1, or HAO1.

[0262] In some embodiments, the target gene is albumin. In some embodiments, the guide polynucleotide is encoded by any one of SEQ ID NOs: 67-86 or a sequence having at least 90%, 95%, 97%, 98%, or 99% sequence identity to any one of SEQ ID NOs: 67-86. In some embodiments, the guide polynucleotide comprises a sequence comprising at least about 46-80 consecutive nucleotides having at least about 20%, at least about 25%, at least about 30%, at least about 35%, at least about 40%, at least about 45%, at least about 50%, at least about 55%, at least about 60%, at least about 65%, at least about 70%, at least about 75%, at least about 80%, at least about 85%, at least about 90%, at least about 91%, at least about 92%, at least about 93%, at least about 94%, at least about 95%, at least about 96%, at least about 97%, at least about 98%, or at least about 99% identity to any one of SEQ ID NOs: 67-86. In some embodiments, the guide polynucleotide is encoded by a sequence having at least about 80% identity to any one of SEQ ID NOs: 67-86. In some embodiments, the guide polynucleotide is encoded by a sequence having at least about 85% identity to any one of SEQ ID NOs: 67-86. In some embodiments, the guide polynucleotide is encoded by a sequence having at least about 90% identity to any one of SEQ ID NOs: 67-86. In some embodiments, the guide polynucleotide is encoded by a sequence having at least about 95% identity to any one of SEQ ID NOs: 67-86. In some embodiments, the guide polynucleotide is encoded by a sequence having at least about 96% identity to any one of SEQ ID NOs: 67-86.

[0263] In some embodiments, the guide polynucleotide is encoded by a sequence having at least about 97% identity to any one of SEQ ID NOs: 67-86. In some embodiments, the guide polynucleotide is encoded by a sequence having at least about 98% identity to any one of SEQ ID NOs: 67-86. In some embodiments, the guide polynucleotide is encoded by a sequence having at least about 99% identity to any one of SEQ ID NOs: 67-86. In some embodiments, the guide polynucleotide is encoded by a sequence having 100% identity to any one of SEQ ID NOs: 67-86.

[0264] In some embodiments, the guide polynucleotide hybridizes or targets a sequence complementary to a target nucleic acid sequence within the albumin gene or within an intron of an endogenous gene. In some embodiments, the guide polynucleotide hybridizes or targets a sequence complementary to any one of SEQ ID NOs: 67-86 or a sequence having at least 90%, 95%, 97%, 98%, or 99% sequence identity to any one of SEQ ID NOs: 67-86. In some embodiments, the guide polynucleotide hybridizes or targets a sequence complementary to a sequence having at least about 80% identity to any one of SEQ ID NOs: 67-86. In some embodiments, the guide polynucleotide hybridizes or targets a sequence complementary to a sequence having at least about 85% identity to any one of SEQ ID NOs: 67-86. In some embodiments, the guide polynucleotide hybridizes or targets a sequence complementary to a sequence having at least about 90% identity to any one of SEQ ID NOs: 67-86. In some embodiments, the guide polynucleotide hybridizes or targets a sequence complementary to a sequence having at least about 95% identity to any one of SEQ ID NOs: 67-86. In some embodiments, the guide polynucleotide hybridizes or targets a sequence complementary to a sequence having at least about 96% identity to any one of SEQ ID NOs: 67-86. In some embodiments, the guide polynucleotide hybridizes or targets a sequence complementary to a sequence having at least about 97% identity to any one of SEQ ID NOs: 67-86. In some embodiments, the guide polynucleotide hybridizes or targets a sequence complementary to a sequence having at least about 98% identity to any one of SEQ ID NOs: 67-86. In some embodiments, the guide polynucleotide hybridizes or targets a sequence complementary to a sequence having at least about 99% identity to any one of SEQ ID NOs: 67-86. In some embodiments, the guide polynucleotide hybridizes or targets a sequence complementary to a sequence having 100% identity to any one of SEQ ID NOs: 67-86.

[0265] In some embodiments, the target gene is TRAC. In some embodiments, the guide polynucleotide is encoded by any one of SEQ ID NOs: 119-138, 922-924, 972-991, 1088-1183, 1280-1320, 2390-2485, and 2582-2617 or a sequence having at least 90%, 95%, 97%, 98%, or 99% sequence identity to any one of SEQ ID NOs: 119-138, 922-924, 972-991, 1088-1183, 1280-1320, 2390-2485, and 2582-2617. In some embodiments, the guide polynucleotide comprises a sequence comprising at least about 46-80 consecutive nucleotides having at least about 20%, at least about 25%, at least about 30%, at least about 35%, at least about 40%, at least about 45%, at least about 50%, at least about 55%, at least about 60%, at least about 65%, at least about 70%, at least about 75%, at least about 80%, at least about 85%, at least about 90%, at least about 91%, at least about 92%, at least about 93%, at least about 94%, at least about 95%, at least about 96%, at least about 97%, at least about 98%, or at least about 99% identity to any one of SEQ ID NOs: 119-138, 922-924, 972-991, 1088-1183, 1280-1320, 2390-2485, and 2582-2617. In some embodiments, the guide polynucleotide is encoded by a sequence having at least about 80% identity to any one of SEQ ID NOs: 119-138, 922-924, 972-991, 1088-1183, 1280-1320, 2390-2485, and 2582-2617. In some embodiments, the guide polynucleotide is encoded by a sequence having at least about 85% identity to any one of SEQ ID NOs: 119-138, 922-924, 972-991, 1088-1183, 1280-1320, 2390-2485, and 2582-2617. In some embodiments, the guide polynucleotide is encoded by a sequence having at least about 90% identity to any one of SEQ ID NOs: 119-138, 922-924, 972-991, 1088-1183, 1280-1320, 2390-2485, and 2582-2617. In some embodiments, the guide polynucleotide is encoded by a sequence having at least about 95% identity to any one of SEQ ID NOs: 119-138, 922-924, 972-991, 1088-1183, 1280-1320, 2390-2485, and 2582-2617. In some embodiments, the guide polynucleotide is encoded by a sequence having at least about 96% identity to any one of SEQ ID NOs: 119-138, 922-924, 972-991, 1088-1183, 1280-1320, 2390-2485, and 2582-2617. In some embodiments, the guide polynucleotide is encoded by a sequence having at least about 97% identity to any one of SEQ ID NOs: 119-138, 922-924, 972-991, 1088-1183, 1280-1320, 2390-2485, and 2582-2617. In some embodiments, the guide polynucleotide is encoded by a sequence having at least about 98% identity to any one of SEQ ID NOs: 119-138, 922-924, 972-991, 1088-1183, 1280-1320, 2390-2485, and 2582-2617. In some embodiments, the guide polynucleotide is encoded by a sequence having at least about 99% identity to any one of SEQ ID NOs: 119-138, 922-924, 972-991, 1088-1183, 1280-1320, 2390-2485, and 2582-2617. In some embodiments, the guide polynucleotide is encoded by a sequence having 100% identity to any one of SEQ ID NOs: 119-138, 922-924, 972-991, 1088-1183, 1280-1320, 2390-2485, and 2582-2617.

[0266] In some embodiments, the guide polynucleotide hybridizes or targets a sequence complementary to a target nucleic acid sequence within the TRAC gene or within an intron of an endogenous gene. In some embodiments, the guide polynucleotide hybridizes or targets a sequence complementary to any one of SEQ ID NOs: 119-138, 922-924, 972-991, 1088-1183, 1280-1320, 2390-2485, and 2582-2617 or a sequence having at least 90%, 95%, 97%, 98%, or 99% sequence identity to any one of SEQ ID NOs: 119-138, 922-924, 972-991, 1088-1183, 1280-1320, 2390-2485, and 2582-2617. In some embodiments, the guide polynucleotide hybridizes or targets a sequence complementary to a sequence having at least about 80% identity to any one of SEQ ID NOs: 119-138, 922-924, 972-991, 1088-1183, 1280-1320, 2390-2485, and 2582-2617. In some embodiments, the guide polynucleotide hybridizes or targets a sequence complementary to a sequence having at least about 85% identity to any one of SEQ ID NOs: 119-138, 922-924, 972-991, 1088-1183, 1280-1320, 2390-2485, and 2582-2617. In some embodiments, the guide polynucleotide hybridizes or targets a sequence complementary to a sequence having at least about 90% identity to any one of SEQ ID NOs: 119-138, 922-924, 972-991, 1088-1183, 1280-1320, 2390-2485, and 2582-2617. In some embodiments, the guide polynucleotide hybridizes or targets a sequence complementary to a sequence having at least about 95% identity to any one of SEQ ID NOs: 119-138, 922-924, 972-991, 1088-1183, 1280-1320, 2390-2485, and 2582-2617. In some embodiments, the guide polynucleotide hybridizes or targets a sequence complementary to a sequence having at least about 96% identity to any one of SEQ ID NOs: 119-138, 922-924, 972-991, 1088-1183, 1280-1320, 2390-2485, and 2582-2617. In some embodiments, the guide polynucleotide hybridizes or targets a sequence complementary to a sequence having at least about 97% identity to any one of SEQ ID NOs: 119-138, 922-924, 972-991, 1088-1183, 1280-1320, 2390-2485, and 2582-2617. In some embodiments, the guide polynucleotide hybridizes or targets a sequence complementary to a sequence having at least about 98% identity to any one of SEQ ID NOs: 119-138, 922-924, 972-991, 1088-1183, 1280-1320, 2390-2485, and 2582-2617. In some embodiments, the guide polynucleotide hybridizes or targets a sequence complementary to a sequence having at least about 99% identity to any one of SEQ ID NOs: 119-138, 922-924, 972-991, 1088-1183, 1280-1320, 2390-2485, and 2582-2617. In some embodiments, the guide polynucleotide hybridizes or targets a sequence complementary to a sequence having 100% identity to any one of SEQ ID NOs: 119-138, 922-924, 972-991, 1088-1183, 1280-1320, 2390-2485, and 2582-2617.

[0267] In some embodiments, the guide polynucleotide hybridizes or targets a sequence within the TRAC gene or within an intron of an endogenous gene. In some embodiments, the guide polynucleotide hybridizes or targets a sequence according to any one of SEQ ID NOs: 139-158,925-927,992-1011, 1184-1279, 1321-1361, 2486-2581, and 2618-2653 or a sequence having at least 90%, 95%, 97%, 98%, or 99% sequence identity to any one of SEQ ID NOs: 139-158, 925-927, 992-1011, 1184-1279, 1321-1361, 2486-2581, and 2618-2653. In some embodiments, the guide polynucleotide hybridizes or targets a sequence having at least about 80% identity to any one of SEQ ID NOs: 139-158, 925-927, 992-1011, 1184-1279, 1321-1361, 2486-2581, and 2618-2653. In some embodiments, the guide polynucleotide hybridizes or targets a sequence having at least about 85% identity to any one of SEQ ID NOs: 139-158, 925-927, 992-1011, 1184-1279, 1321-1361, 2486-2581, and 2618-2653. In some embodiments, the guide polynucleotide hybridizes or targets a sequence having at least about 90% identity to any one of SEQ ID NOs: 139-158, 925-927, 992-1011, 1184-1279, 1321-1361, 2486-2581, and 2618-2653. In some embodiments, the guide polynucleotide hybridizes or targets a sequence having at least about 95% identity to any one of SEQ ID NOs: 139-158, 925-927, 992-1011, 1184-1279, 1321-1361, 2486-2581, and 2618-2653. In some embodiments, the guide polynucleotide hybridizes or targets a sequence having at least about 96% identity to any one of SEQ ID NOs: 139-158, 925-927, 992-1011, 1184-1279, 1321-1361, 2486-2581, and 2618-2653. In some embodiments, the guide polynucleotide hybridizes or targets a sequence having at least about 97% identity to any one of SEQ ID NOs: 139-158, 925-927, 992-1011, 1184-1279, 1321-1361, 2486-2581, and 2618-2653. In some embodiments, the guide polynucleotide hybridizes or targets a sequence having at least about 98% identity to any one of SEQ ID NOs: 139-158, 925-927, 992-1011, 1184-1279, 1321-1361, 2486-2581, and 2618-2653. In some embodiments, the guide polynucleotide hybridizes or targets a sequence having at least about 99% identity to any one of SEQ ID NOs: 139-158, 925-927, 992-1011, 1184-1279, 1321-1361, 2486-2581, and 2618-2653. In some embodiments, the guide polynucleotide hybridizes or targets a sequence having 100% identity to any one of SEQ ID NOs: 139-158, 925-927, 992-1011, 1184-1279, 1321-1361, 2486-2581, and 2618-2653.

[0268] In some embodiments, the target gene is B2M. In some embodiments, the guide polynucleotide is encoded by any one of SEQ ID NOs: 159-184 or a sequence having at least 90%, 95%, 97%, 98%, or 99% sequence identity to any one of SEQ ID NOs: 159-184. In some embodiments, the guide polynucleotide comprises a sequence comprising at least about 46-80 consecutive nucleotides having at least about 20%, at least about 25%, at least about 30%, at least about 35%, at least about 40%, at least about 45%, at least about 50%, at least about 55%, at least about 60%, at least about 65%, at least about 70%, at least about 75%, at least about 80%, at least about 85%, at least about 90%, at least about 91%, at least about 92%, at least about 93%, at least about 94%, at least about 95%, at least about 96%, at least about 97%, at least about 98%, or at least about 99% identity to any one of SEQ ID NOs: 159-184. In some embodiments, the guide polynucleotide is encoded by a sequence having at least about 80% identity to any one of SEQ ID NOs: 159-184. In some embodiments, the guide polynucleotide is encoded by a sequence having at least about 85% identity to any one of SEQ ID NOs: 159-184. In some embodiments, the guide polynucleotide is encoded by a sequence having at least about 90% identity to any one of SEQ ID NOs: 159-184. In some embodiments, the guide polynucleotide is encoded by a sequence having at least about 95% identity to any one of SEQ ID NOs: 159-184. In some embodiments, the guide polynucleotide is encoded by a sequence having at least about 96% identity to any one of SEQ ID NOs: 159-184. In some embodiments, the guide polynucleotide is encoded by a sequence having at least about 97% identity to any one of SEQ ID NOs: 159-184. In some embodiments, the guide polynucleotide is encoded by a sequence having at least about 98% identity to any one of SEQ ID NOs: 159-184. In some embodiments, the guide polynucleotide is encoded by a sequence having at least about 99% identity to any one of SEQ ID NOs: 159-184. In some embodiments, the guide polynucleotide is encoded by a sequence having 100% identity to any one of SEQ ID NOs: 159-184.

[0269] In some embodiments, the guide polynucleotide hybridizes or targets a sequence complementary to a target nucleic acid sequence within the B2M gene or within an intron of an endogenous gene. In some embodiments, the guide polynucleotide hybridizes or targets a sequence complementary to any one of SEQ ID NOs: 159-184 or a sequence having at least 90%, 95%, 97%, 98%, or 99% sequence identity to any one of SEQ ID NOs: 159-184. In some embodiments, the guide polynucleotide hybridizes or targets a sequence complementary to a sequence having at least about 80% identity to any one of SEQ ID NOs: 159-184. In some embodiments, the guide polynucleotide hybridizes or targets a sequence complementary to a sequence having at least about 85% identity to any one of SEQ ID NOs: 159-184. In some embodiments, the guide polynucleotide hybridizes or targets a sequence complementary to a sequence having at least about 90% identity to any one of SEQ ID NOs: 159-184. In some embodiments, the guide polynucleotide hybridizes or targets a sequence complementary to a sequence having at least about 95% identity to any one of SEQ ID NOs: 159-184. In some embodiments, the guide polynucleotide hybridizes or targets a sequence complementary to a sequence having at least about 96% identity to any one of SEQ ID NOs: 159-184. In some embodiments, the guide polynucleotide hybridizes or targets a sequence complementary to a sequence having at least about 97% identity to any one of SEQ ID NOs: 159-184. In some embodiments, the guide polynucleotide hybridizes or targets a sequence complementary to a sequence having at least about 98% identity to any one of SEQ ID NOs: 159-184. In some embodiments, the guide polynucleotide hybridizes or targets a sequence complementary to a sequence having at least about 99% identity to any one of SEQ ID NOs: 159-184. In some embodiments, the guide polynucleotide hybridizes or targets a sequence complementary to a sequence having 100% identity to any one of SEQ ID NOs: 159-184.

[0270] In some embodiments, the guide polynucleotide hybridizes or targets a sequence within the B2M gene or within an intron of an endogenous gene. In some embodiments, the guide polynucleotide hybridizes or targets a sequence according to any one of SEQ ID NOs: 185-210 or a sequence having at least 90%, 95%, 97%, 98%, or 99% sequence identity to any one of SEQ ID NOs: 185-210. In some embodiments, the guide polynucleotide hybridizes or targets a sequence having at least about 80% identity to any one of SEQ ID NOs: 185-210. In some embodiments, the guide polynucleotide hybridizes or targets a sequence having at least about 85% identity to any one of SEQ ID NOs: 185-210. In some embodiments, the guide polynucleotide hybridizes or targets a sequence having at least about 90% identity to any one of SEQ ID NOs: 185-210. In some embodiments, the guide polynucleotide hybridizes or targets a sequence having at least about 95% identity to any one of SEQ ID NOs: 185-210. In some embodiments, the guide polynucleotide hybridizes or targets a sequence having at least about 96% identity to any one of SEQ ID NOs: 185-210. In some embodiments, the guide polynucleotide hybridizes or targets a sequence having at least about 97% identity to any one of SEQ ID NOs: 185-210. In some embodiments, the guide polynucleotide hybridizes or targets a sequence having at least about 98% identity to any one of SEQ ID NOs: 185-210. In some embodiments, the guide polynucleotide hybridizes or targets a sequence having at least about 99% identity to any one of SEQ ID NOs: 185-210. In some embodiments, the guide polynucleotide hybridizes or targets a sequence having 100% identity to any one of SEQ ID NOs: 185-210.

[0271] In some embodiments, the target gene is TRBC1. In some embodiments, the guide polynucleotide is encoded by any one of SEQ ID NOs: 211-251 or a sequence having at least 90%, 95%, 97%, 98%, or 99% sequence identity to any one of SEQ ID NOs: 211-251. In some embodiments, the guide polynucleotide comprises a sequence comprising at least about 46-80 consecutive nucleotides having at least about 20%, at least about 25%, at least about 30%, at least about 35%, at least about 40%, at least about 45%, at least about 50%, at least about 55%, at least about 60%, at least about 65%, at least about 70%, at least about 75%, at least about 80%, at least about 85%, at least about 90%, at least about 91%, at least about 92%, at least about 93%, at least about 94%, at least about 95%, at least about 96%, at least about 97%, at least about 98%, or at least about 99% identity to any one of SEQ ID NOs: 211-251. In some embodiments, the guide polynucleotide is encoded by a sequence having at least about 80% identity to any one of SEQ ID NOs: 211-251. In some embodiments, the guide polynucleotide is encoded by a sequence having at least about 85% identity to any one of SEQ ID NOs: 211-251. In some embodiments, the guide polynucleotide is encoded by a sequence having at least about 90% identity to any one of SEQ ID NOs: 211-251. In some embodiments, the guide polynucleotide is encoded by a sequence having at least about 95% identity to any one of SEQ ID NOs: 211-251. In some embodiments, the guide polynucleotide is encoded by a sequence having at least about 96% identity to any one of SEQ ID NOs: 211-251. In some embodiments, the guide polynucleotide is encoded by a sequence having at least about 97% identity to any one of SEQ ID NOs: 211-251. In some embodiments, the guide polynucleotide is encoded by a sequence having at least about 98% identity to any one of SEQ ID NOs: 211-251. In some embodiments, the guide polynucleotide is encoded by a sequence having at least about 99% identity to any one of SEQ ID NOs: 211-251. In some embodiments, the guide polynucleotide is encoded by a sequence having 100% identity to any one of SEQ ID NOs: 211-251.

[0272] In some embodiments, the guide polynucleotide hybridizes or targets a sequence complementary to a target nucleic acid sequence within the TRBC1 gene or within an intron of an endogenous gene. In some embodiments, the guide polynucleotide hybridizes or targets a sequence complementary to any one of SEQ ID NOs: 211-251 or a sequence having at least 90%, 95%, 97%, 98%, or 99% sequence identity to any one of SEQ ID NOs: 211-251. In some embodiments, the guide polynucleotide hybridizes or targets a sequence complementary to a sequence having at least about 80% identity to any one of SEQ ID NOs: 211-251. In some embodiments, the guide polynucleotide hybridizes or targets a sequence complementary to a sequence having at least about 85% identity to any one of SEQ ID NOs: 211-251. In some embodiments, the guide polynucleotide hybridizes or targets a sequence complementary to a sequence having at least about 90% identity to any one of SEQ ID NOs: 211-251. In some embodiments, the guide polynucleotide hybridizes or targets a sequence complementary to a sequence having at least about 95% identity to any one of SEQ ID NOs: 211-251. In some embodiments, the guide polynucleotide hybridizes or targets a sequence complementary to a sequence having at least about 96% identity to any one of SEQ ID NOs: 211-251. In some embodiments, the guide polynucleotide hybridizes or targets a sequence complementary to a sequence having at least about 97% identity to any one of SEQ ID NOs: 211-251. In some embodiments, the guide polynucleotide hybridizes or targets a sequence complementary to a sequence having at least about 98% identity to any one of SEQ ID NOs: 211-251. In some embodiments, the guide polynucleotide hybridizes or targets a sequence complementary to a sequence having at least about 99% identity to any one of SEQ ID NOs: 211-251. In some embodiments, the guide polynucleotide hybridizes or targets a sequence complementary to a sequence having 100% identity to any one of SEQ ID NOs: 211-251.

[0273] In some embodiments, the guide polynucleotide hybridizes or targets a sequence within the TRBC1 gene or within an intron of an endogenous gene. In some embodiments, the guide polynucleotide hybridizes or targets a sequence according to any one of SEQ ID NOs: 252-292 or a sequence having at least 90%, 95%, 97%, 98%, or 99% sequence identity to any one of SEQ ID NOs: 252-292. In some embodiments, the guide polynucleotide hybridizes or targets a sequence having at least about 80% identity to any one of SEQ ID NOs: 252-292. In some embodiments, the guide polynucleotide hybridizes or targets a sequence having at least about 85% identity to any one of SEQ ID NOs: 252-292. In some embodiments, the guide polynucleotide hybridizes or targets a sequence having at least about 90% identity to any one of SEQ ID NOs: 252-292. In some embodiments, the guide polynucleotide hybridizes or targets a sequence having at least about 95% identity to any one of SEQ ID NOs: 252-292. In some embodiments, the guide polynucleotide hybridizes or targets a sequence having at least about 96% identity to any one of SEQ ID NOs: 252-292. In some embodiments, the guide polynucleotide hybridizes or targets a sequence having at least about 97% identity to any one of SEQ ID NOs: 252-292. In some embodiments, the guide polynucleotide hybridizes or targets a sequence having at least about 98% identity to any one of SEQ ID NOs: 252-292. In some embodiments, the guide polynucleotide hybridizes or targets a sequence having at least about 99% identity to any one of SEQ ID NOs: 252-292. In some embodiments, the guide polynucleotide hybridizes or targets a sequence having 100% identity to any one of SEQ ID NOs: 252-292.

[0274] In some embodiments, the target gene is TRBC2. In some embodiments, the guide polynucleotide is encoded by any one of SEQ ID NOs: 293-337 or a sequence having at least 90%, 95%, 97%, 98%, or 99% sequence identity to any one of SEQ ID NOs: 293-337. In some embodiments, the guide polynucleotide comprises a sequence comprising at least about 46-80 consecutive nucleotides having at least about 20%, at least about 25%, at least about 30%, at least about 35%, at least about 40%, at least about 45%, at least about 50%, at least about 55%, at least about 60%, at least about 65%, at least about 70%, at least about 75%, at least about 80%, at least about 85%, at least about 90%, at least about 91%, at least about 92%, at least about 93%, at least about 94%, at least about 95%, at least about 96%, at least about 97%, at least about 98%, or at least about 99% identity to any one of SEQ ID NOs: 293-337. In some embodiments, the guide polynucleotide is encoded by a sequence having at least about 80% identity to any one of SEQ ID NOs: 293-337. In some embodiments, the guide polynucleotide is encoded by a sequence having at least about 85% identity to any one of SEQ ID NOs: 293-337. In some embodiments, the guide polynucleotide is encoded by a sequence having at least about 90% identity to any one of SEQ ID NOs: 293-337. In some embodiments, the guide polynucleotide is encoded by a sequence having at least about 95% identity to any one of SEQ ID NOs: 293-337. In some embodiments, the guide polynucleotide is encoded by a sequence having at least about 96% identity to any one of SEQ ID NOs: 293-337. In some embodiments, the guide polynucleotide is encoded by a sequence having at least about 97% identity to any one of SEQ ID NOs: 293-337. In some embodiments, the guide polynucleotide is encoded by a sequence having at least about 98% identity to any one of SEQ ID NOs: 293-337. In some embodiments, the guide polynucleotide is encoded by a sequence having at least about 99% identity to any one of SEQ ID NOs: 293-337. In some embodiments, the guide polynucleotide is encoded by a sequence having 100% identity to any one of SEQ ID NOs: 293-337.

[0275] In some embodiments, the guide polynucleotide hybridizes or targets a sequence complementary to a target nucleic acid sequence within the TRBC2 gene or within an intron of an endogenous gene. In some embodiments, the guide polynucleotide hybridizes or targets a sequence complementary to any one of SEQ ID NOs: 293-337 or a sequence having at least 90%, 95%, 97%, 98%, or 99% sequence identity to any one of SEQ ID NOs: 293-337. In some embodiments, the guide polynucleotide hybridizes or targets a sequence complementary to a sequence having at least about 80% identity to any one of SEQ ID NOs: 293-337. In some embodiments, the guide polynucleotide hybridizes or targets a sequence complementary to a sequence having at least about 85% identity to any one of SEQ ID NOs: 293-337. In some embodiments, the guide polynucleotide hybridizes or targets a sequence complementary to a sequence having at least about 90% identity to any one of SEQ ID NOs: 293-337. In some embodiments, the guide polynucleotide hybridizes or targets a sequence complementary to a sequence having at least about 95% identity to any one of SEQ ID NOs: 293-337. In some embodiments, the guide polynucleotide hybridizes or targets a sequence complementary to a sequence having at least about 96% identity to any one of SEQ ID NOs: 293-337. In some embodiments, the guide polynucleotide hybridizes or targets a sequence complementary to a sequence having at least about 97% identity to any one of SEQ ID NOs: 293-337. In some embodiments, the guide polynucleotide hybridizes or targets a sequence complementary to a sequence having at least about 98% identity to any one of SEQ ID NOs: 293-337. In some embodiments, the guide polynucleotide hybridizes or targets a sequence complementary to a sequence having at least about 99% identity to any one of SEQ ID NOs: 293-337. In some embodiments, the guide polynucleotide hybridizes or targets a sequence complementary to a sequence having 100% identity to any one of SEQ ID NOs: 293-337.

[0276] In some embodiments, the guide polynucleotide hybridizes or targets a sequence within the TRBC2 gene or within an intron of an endogenous gene. In some embodiments, the guide polynucleotide hybridizes or targets a sequence according to any one of SEQ ID NOs: 338-382 or a sequence having at least 90%, 95%, 97%, 98%, or 99% sequence identity to any one of SEQ ID NOs: 338-382. In some embodiments, the guide polynucleotide hybridizes or targets a sequence having at least about 80% identity to any one of SEQ ID NOs: 338-382. In some embodiments, the guide polynucleotide hybridizes or targets a sequence having at least about 85% identity to any one of SEQ ID NOs: 338-382. In some embodiments, the guide polynucleotide hybridizes or targets a sequence having at least about 90% identity to any one of SEQ ID NOs: 338-382. In some embodiments, the guide polynucleotide hybridizes or targets a sequence having at least about 95% identity to any one of SEQ ID NOs: 338-382. In some embodiments, the guide polynucleotide hybridizes or targets a sequence having at least about 96% identity to any one of SEQ ID NOs: 338-382. In some embodiments, the guide polynucleotide hybridizes or targets a sequence having at least about 97% identity to any one of SEQ ID NOs: 338-382. In some embodiments, the guide polynucleotide hybridizes or targets a sequence having at least about 98% identity to any one of SEQ ID NOs: 338-382. In some embodiments, the guide polynucleotide hybridizes or targets a sequence having at least about 99% identity to any one of SEQ ID NOs: 338-382. In some embodiments, the guide polynucleotide hybridizes or targets a sequence having 100% identity to any one of SEQ ID NOs: 338-382.

[0277] In some embodiments, the target gene is ANGPTL3. In some embodiments, the guide polynucleotide is encoded by any one of SEQ ID NOs: 383-477, 1392-1489, 2120-2215, and 2312-2350 or a sequence having at least 90%, 95%, 97%, 98%, or 99% sequence identity to any one of SEQ ID NOs: 383-477, 1392-1489, 2120-2215, and 2312-2350. In some embodiments, the guide polynucleotide comprises a sequence comprising at least about 46-80 consecutive nucleotides having at least about 20%, at least about 25%, at least about 30%, at least about 35%, at least about 40%, at least about 45%, at least about 50%, at least about 55%, at least about 60%, at least about 65%, at least about 70%, at least about 75%, at least about 80%, at least about 85%, at least about 90%, at least about 91%, at least about 92%, at least about 93%, at least about 94%, at least about 95%, at least about 96%, at least about 97%, at least about 98%, or at least about 99% identity to any one of SEQ ID NOs: 383-477, 1392-1489, 2120-2215, and 2312-2350. In some embodiments, the guide polynucleotide is encoded by a sequence having at least about 80% identity to any one of SEQ ID NOs: 383-477, 1392-1489, 2120-2215, and 2312-2350. In some embodiments, the guide polynucleotide is encoded by a sequence having at least about 85% identity to any one of SEQ ID NOs: 383-477, 1392-1489, 2120-2215, and 2312-2350. In some embodiments, the guide polynucleotide is encoded by a sequence having at least about 90% identity to any one of SEQ ID NOs: 383-477, 1392-1489, 2120-2215, and 2312-2350. In some embodiments, the guide polynucleotide is encoded by a sequence having at least about 95% identity to any one of SEQ ID NOs: 383-477, 1392-1489, 2120-2215, and 2312-2350. In some embodiments, the guide polynucleotide is encoded by a sequence having at least about 96% identity to any one of SEQ ID NOs: 383-477, 1392-1489, 2120-2215, and 2312-2350. In some embodiments, the guide polynucleotide is encoded by a sequence having at least about 97% identity to any one of SEQ ID NOs: 383-477, 1392-1489, 2120-2215, and 2312-2350. In some embodiments, the guide polynucleotide is encoded by a sequence having at least about 98% identity to any one of SEQ ID NOs: 383-477, 1392-1489, 2120-2215, and 2312-2350. In some embodiments, the guide polynucleotide is encoded by a sequence having at least about 99% identity to any one of SEQ ID NOs: 383-477, 1392-1489, 2120-2215, and 2312-2350. In some embodiments, the guide polynucleotide is encoded by a sequence having 100% identity to any one of SEQ ID NOs: 383-477, 1392-1489, 2120-2215, and 2312-2350.

[0278] In some embodiments, the guide polynucleotide hybridizes or targets a sequence complementary to a target nucleic acid sequence within the ANGPTL3 gene or within an intron of an endogenous gene. In some embodiments, the guide polynucleotide hybridizes or targets a sequence complementary to any one of SEQ ID NOs: 383-477, 1392-1489, 2120-2215, and 2312-2350 or a sequence having at least 90%, 95%, 97%, 98%, or 99% sequence identity to any one of SEQ ID NOs: 383-477, 1392-1489, 2120-2215, and 2312-2350. In some embodiments, the guide polynucleotide hybridizes or targets a sequence complementary to a sequence having at least about 80% identity to any one of SEQ ID NOs: 383-477, 1392-1489, 2120-2215, and 2312-2350. In some embodiments, the guide polynucleotide hybridizes or targets a sequence complementary to a sequence having at least about 85% identity to any one of SEQ ID NOs: 383-477, 1392-1489, 2120-2215, and 2312-2350. In some embodiments, the guide polynucleotide hybridizes or targets a sequence complementary to a sequence having at least about 90% identity to any one of SEQ ID NOs: 383-477, 1392-1489, 2120-2215, and 2312-2350. In some embodiments, the guide polynucleotide hybridizes or targets a sequence complementary to a sequence having at least about 95% identity to any one of SEQ ID NOs: 383-477, 1392-1489, 2120-2215, and 2312-2350. In some embodiments, the guide polynucleotide hybridizes or targets a sequence complementary to a sequence having at least about 96% identity to any one of SEQ ID NOs: 383-477, 1392-1489, 2120-2215, and 2312-2350. In some embodiments, the guide polynucleotide hybridizes or targets a sequence complementary to a sequence having at least about 97% identity to any one of SEQ ID NOs: 383-477, 1392-1489, 2120-2215, and 2312-2350. In some embodiments, the guide polynucleotide hybridizes or targets a sequence complementary to a sequence having at least about 98% identity to any one of SEQ ID NOs: 383-477, 1392-1489, 2120-2215, and 2312-2350. In some embodiments, the guide polynucleotide hybridizes or targets a sequence complementary to a sequence having at least about 99% identity to any one of SEQ ID NOs: 383-477, 1392-1489, 2120-2215, and 2312-2350. In some embodiments, the guide polynucleotide hybridizes or targets a sequence complementary to a sequence having 100% identity to any one of SEQ ID NOs: 383-477, 1392-1489, 2120-2215, and 2312-2350.

[0279] In some embodiments, the guide polynucleotide hybridizes or targets a sequence within the ANGPTL3 gene or within an intron of an endogenous gene. In some embodiments, the guide polynucleotide hybridizes or targets a sequence according to any one of SEQ ID NOs: 478-572, 1490-1587, 2216-2311, and 2351-2389 or a sequence having at least 90%, 95%, 97%, 98%, or 99% sequence identity to any one of SEQ ID NOs: 478-572, 1490-1587, 2216-2311, and 2351-2389. In some embodiments, the guide polynucleotide hybridizes or targets a sequence having at least about 80% identity to any one of SEQ ID NOs: 478-572, 1490-1587, 2216-2311, and 2351-2389. In some embodiments, the guide polynucleotide hybridizes or targets a sequence having at least about 85% identity to any one of SEQ ID NOs: 478-572, 1490-1587, 2216-2311, and 2351-2389. In some embodiments, the guide polynucleotide hybridizes or targets a sequence having at least about 90% identity to any one of SEQ ID NOs: 478-572, 1490-1587, 2216-2311, and 2351-2389. In some embodiments, the guide polynucleotide hybridizes or targets a sequence having at least about 95% identity to any one of SEQ ID NOs: 478-572, 1490-1587, 2216-2311, and 2351-2389. In some embodiments, the guide polynucleotide hybridizes or targets a sequence having at least about 96% identity to any one of SEQ ID NOs: 478-572, 1490-1587, 2216-2311, and 2351-2389. In some embodiments, the guide polynucleotide hybridizes or targets a sequence having at least about 97% identity to any one of SEQ ID NOs: 478-572, 1490-1587, 2216-2311, and 2351-2389. In some embodiments, the guide polynucleotide hybridizes or targets a sequence having at least about 98% identity to any one of SEQ ID NOs: 478-572, 1490-1587, 2216-2311, and 2351-2389. In some embodiments, the guide polynucleotide hybridizes or targets a sequence having at least about 99% identity to any one of SEQ ID NOs: 478-572, 1490-1587, 2216-2311, and 2351-2389. In some embodiments, the guide polynucleotide hybridizes or targets a sequence having 100% identity to any one of SEQ ID NOs: 478-572, 1490-1587, 2216-2311, and 2351-2389.

[0280] In some embodiments, the target gene is PCSK9. In some embodiments, the guide polynucleotide is encoded by any one of SEQ ID NOs: 573-587 and 1362-1376 or a sequence having at least 90%, 95%, 97%, 98%, or 99% sequence identity to any one of SEQ ID NOs: 573-587 and 1362-1376. In some embodiments, the guide polynucleotide comprises a sequence comprising at least about 46-80 consecutive nucleotides having at least about 20%, at least about 25%, at least about 30%, at least about 35%, at least about 40%, at least about 45%, at least about 50%, at least about 55%, at least about 60%, at least about 65%, at least about 70%, at least about 75%, at least about 80%, at least about 85%, at least about 90%, at least about 91%, at least about 92%, at least about 93%, at least about 94%, at least about 95%, at least about 96%, at least about 97%, at least about 98%, or at least about 99% identity to any one of SEQ ID NOs: 573-587 and 1362-1376. In some embodiments, the guide polynucleotide is encoded by a sequence having at least about 80% identity to any one of SEQ ID NOs: 573-587 and 1362-1376. In some embodiments, the guide polynucleotide is encoded by a sequence having at least about 85% identity to any one of SEQ ID NOs: 573-587 and 1362-1376. In some embodiments, the guide polynucleotide is encoded by a sequence having at least about 90% identity to any one of SEQ ID NOs: 573-587 and 1362-1376. In some embodiments, the guide polynucleotide is encoded by a sequence having at least about 95% identity to any one of SEQ ID NOs: 573-587 and 1362-1376. In some embodiments, the guide polynucleotide is encoded by a sequence having at least about 96% identity to any one of SEQ ID NOs: 573-587 and 1362-1376. In some embodiments, the guide polynucleotide is encoded by a sequence having at least about 97% identity to any one of SEQ ID NOs: 573-587 and 1362-1376. In some embodiments, the guide polynucleotide is encoded by a sequence having at least about 98% identity to any one of SEQ ID NOs: 573-587 and 1362-1376. In some embodiments, the guide polynucleotide is encoded by a sequence having at least about 99% identity to any one of SEQ ID NOs: 573-587 and 1362-1376. In some embodiments, the guide polynucleotide is encoded by a sequence having 100% identity to any one of SEQ ID NOs: 573-587 and 1362-1376.

[0281] In some embodiments, the guide polynucleotide hybridizes or targets a sequence complementary to a target nucleic acid sequence within the PCSK9 gene or within an intron of an endogenous gene. In some embodiments, the guide polynucleotide hybridizes or targets a sequence complementary to any one of SEQ ID NOs: 573-587 and 1362-1376 or a sequence having at least 90%, 95%, 97%, 98%, or 99% sequence identity to any one of SEQ ID NOs: 573-587 and 1362-1376. In some embodiments, the guide polynucleotide hybridizes or targets a sequence complementary to a sequence having at least about 80% identity to any one of SEQ ID NOs: 573-587 and 1362-1376. In some embodiments, the guide polynucleotide hybridizes or targets a sequence complementary to a sequence having at least about 85% identity to any one of SEQ ID NOs: 573-587 and 1362-1376. In some embodiments, the guide polynucleotide hybridizes or targets a sequence complementary to a sequence having at least about 90% identity to any one of SEQ ID NOs: 573-587 and 1362-1376. In some embodiments, the guide polynucleotide hybridizes or targets a sequence complementary to a sequence having at least about 95% identity to any one of SEQ ID NOs: 573-587 and 1362-1376. In some embodiments, the guide polynucleotide hybridizes or targets a sequence complementary to a sequence having at least about 96% identity to any one of SEQ ID NOs: 573-587 and 1362-1376. In some embodiments, the guide polynucleotide hybridizes or targets a sequence complementary to a sequence having at least about 97% identity to any one of SEQ ID NOs: 573-587 and 1362-1376. In some embodiments, the guide polynucleotide hybridizes or targets a sequence complementary to a sequence having at least about 98% identity to any one of SEQ ID NOs: 573-587 and 1362-1376. In some embodiments, the guide polynucleotide hybridizes or targets a sequence complementary to a sequence having at least about 99% identity to any one of SEQ ID NOs: 573-587 and 1362-1376. In some embodiments, the guide polynucleotide hybridizes or targets a sequence complementary to a sequence having 100% identity to any one of SEQ ID NOs: 573-587 and 1362-1376.

[0282] In some embodiments, the guide polynucleotide hybridizes or targets a sequence within the PCSK9 gene or within an intron of an endogenous gene. In some embodiments, the guide polynucleotide hybridizes or targets a sequence according to any one of SEQ ID NOs: 588-602 and 1377-1391 or a sequence having at least 90%, 95%, 97%, 98%, or 99% sequence identity to any one of SEQ ID NOs: 588-602 and 1377-1391. In some embodiments, the guide polynucleotide hybridizes or targets a sequence having at least about 80% identity to any one of SEQ ID NOs: 588-602 and 1377-1391. In some embodiments, the guide polynucleotide hybridizes or targets a sequence having at least about 85% identity to any one of SEQ ID NOs: 588-602 and 1377-1391. In some embodiments, the guide polynucleotide hybridizes or targets a sequence having at least about 90% identity to any one of SEQ ID NOs: 588-602 and 1377-1391. In some embodiments, the guide polynucleotide hybridizes or targets a sequence having at least about 95% identity to any one of SEQ ID NOs: 588-602 and 1377-1391. In some embodiments, the guide polynucleotide hybridizes or targets a sequence having at least about 96% identity to any one of SEQ ID NOs: 588-602 and 1377-1391. In some embodiments, the guide polynucleotide hybridizes or targets a sequence having at least about 97% identity to any one of SEQ ID NOs: 588-602 and 1377-1391. In some embodiments, the guide polynucleotide hybridizes or targets a sequence having at least about 98% identity to any one of SEQ ID NOs: 588-602 and 1377-1391. In some embodiments, the guide polynucleotide hybridizes or targets a sequence having at least about 99% identity to any one of SEQ ID NOs: 588-602 and 1377-1391. In some embodiments, the guide polynucleotide hybridizes or targets a sequence having 100% identity to any one of SEQ ID NOs: 588-602 and 1377-1391.

[0283] In some embodiments, the target gene is VCP (e.g., VCP R155). In some embodiments, the guide polynucleotide is encoded by any one of SEQ ID NOs: 723-738 and 755-762 or a sequence having at least 90%, 95%, 97%, 98%, or 99% sequence identity to any one of SEQ ID NOs: 723-738 and 755-762. In some embodiments, the guide polynucleotide comprises a sequence comprising at least about 46-80 consecutive nucleotides having at least about 20%, at least about 25%, at least about 30%, at least about 35%, at least about 40%, at least about 45%, at least about 50%, at least about 55%, at least about 60%, at least about 65%, at least about 70%, at least about 75%, at least about 80%, at least about 85%, at least about 90%, at least about 91%, at least about 92%, at least about 93%, at least about 94%, at least about 95%, at least about 96%, at least about 97%, at least about 98%, or at least about 99% identity to any one of SEQ ID NOs: 723-738 and 755-762. In some embodiments, the guide polynucleotide is encoded by a sequence having at least about 80% identity to any one of SEQ ID NOs: 723-738 and 755-762. In some embodiments, the guide polynucleotide is encoded by a sequence having at least about 85% identity to any one of SEQ ID NOs: 723-738 and 755-762. In some embodiments, the guide polynucleotide is encoded by a sequence having at least about 90% identity to any one of SEQ ID NOs: 723-738 and 755-762. In some embodiments, the guide polynucleotide is encoded by a sequence having at least about 95% identity to any one of SEQ ID NOs: 723-738 and 755-762. In some embodiments, the guide polynucleotide is encoded by a sequence having at least about 96% identity to any one of SEQ ID NOs: 723-738 and 755-762. In some embodiments, the guide polynucleotide is encoded by a sequence having at least about 97% identity to any one of SEQ ID NOs: 723-738 and 755-762. In some embodiments, the guide polynucleotide is encoded by a sequence having at least about 98% identity to any one of SEQ ID NOs: 723-738 and 755-762. In some embodiments, the guide polynucleotide is encoded by a sequence having at least about 99% identity to any one of SEQ ID NOs: 723-738 and 755-762. In some embodiments, the guide polynucleotide is encoded by a sequence having 100% identity to any one of SEQ ID NOs: 723-738 and 755-762.

[0284] In some embodiments, the guide polynucleotide hybridizes or targets a sequence complementary to a target nucleic acid sequence within the VCP gene or within an intron of an endogenous gene. In some embodiments, the guide polynucleotide hybridizes or targets a sequence complementary to any one of SEQ ID NOs: 723-738 and 755-762 or a sequence having at least 90%, 95%, 97%, 98%, or 99% sequence identity to any one of SEQ ID NOs: 723-738 and 755-762. In some embodiments, the guide polynucleotide hybridizes or targets a sequence complementary to a sequence having at least about 80% identity to any one of SEQ ID NOs: 723-738 and 755-762. In some embodiments, the guide polynucleotide hybridizes or targets a sequence complementary to a sequence having at least about 85% identity to any one of SEQ ID NOs: 723-738 and 755-762. In some embodiments, the guide polynucleotide hybridizes or targets a sequence complementary to a sequence having at least about 90% identity to any one of SEQ ID NOs: 723-738 and 755-762. In some embodiments, the guide polynucleotide hybridizes or targets a sequence complementary to a sequence having at least about 95% identity to any one of SEQ ID NOs: 723-738 and 755-762. In some embodiments, the guide polynucleotide hybridizes or targets a sequence complementary to a sequence having at least about 96% identity to any one of SEQ ID NOs: 723-738 and 755-762. In some embodiments, the guide polynucleotide hybridizes or targets a sequence complementary to a sequence having at least about 97% identity to any one of SEQ ID NOs: 723-738 and 755-762. In some embodiments, the guide polynucleotide hybridizes or targets a sequence complementary to a sequence having at least about 98% identity to any one of SEQ ID NOs: 723-738 and 755-762. In some embodiments, the guide polynucleotide hybridizes or targets a sequence complementary to a sequence having at least about 99% identity to any one of SEQ ID NOs: 723-738 and 755-762. In some embodiments, the guide polynucleotide hybridizes or targets a sequence complementary to a sequence having 100% identity to any one of SEQ ID NOs: 723-738 and 755-762.

[0285] In some embodiments, the guide polynucleotide hybridizes or targets a sequence within the VCP gene or within an intron of an endogenous gene. In some embodiments, the guide polynucleotide hybridizes or targets a sequence according to any one of SEQ ID NOs: 739-754 and 763-770 or a sequence having at least 90%, 95%, 97%, 98%, or 99% sequence identity to any one of SEQ ID NOs: 739-754 and 763-770. In some embodiments, the guide polynucleotide hybridizes or targets a sequence having at least about 80% identity to any one of SEQ ID NOs: 739-754 and 763-770. In some embodiments, the guide polynucleotide hybridizes or targets a sequence having at least about 85% identity to any one of SEQ ID NOs: 739-754 and 763-770. In some embodiments, the guide polynucleotide hybridizes or targets a sequence having at least about 90% identity to any one of SEQ ID NOs: 739-754 and 763-770. In some embodiments, the guide polynucleotide hybridizes or targets a sequence having at least about 95% identity to any one of SEQ ID NOs: 739-754 and 763-770. In some embodiments, the guide polynucleotide hybridizes or targets a sequence having at least about 96% identity to any one of SEQ ID NOs: 739-754 and 763-770. In some embodiments, the guide polynucleotide hybridizes or targets a sequence having at least about 97% identity to any one of SEQ ID NOs: 739-754 and 763-770. In some embodiments, the guide polynucleotide hybridizes or targets a sequence having at least about 98% identity to any one of SEQ ID NOs: 739-754 and 763-770. In some embodiments, the guide polynucleotide hybridizes or targets a sequence having at least about 99% identity to any one of SEQ ID NOs: 739-754 and 763-770. In some embodiments, the guide polynucleotide hybridizes or targets a sequence having 100% identity to any one of SEQ ID NOs: 739-754 and 763-770.

[0286] In some embodiments, the target locus is AAVS1. In some embodiments, the guide polynucleotide is encoded by any one of SEQ ID NOs: 928-949 and 1012-1049 or a sequence having at least 90%, 95%, 97%, 98%, or 99% sequence identity to any one of SEQ ID NOs: 928-949 and 1012-1049. In some embodiments, the guide polynucleotide comprises a sequence comprising at least about 46-80 consecutive nucleotides having at least about 20%, at least about 25%, at least about 30%, at least about 35%, at least about 40%, at least about 45%, at least about 50%, at least about 55%, at least about 60%, at least about 65%, at least about 70%, at least about 75%, at least about 80%, at least about 85%, at least about 90%, at least about 91%, at least about 92%, at least about 93%, at least about 94%, at least about 95%, at least about 96%, at least about 97%, at least about 98%, or at least about 99% identity to any one of SEQ ID NOs: 928-949 and 1012-1049. In some embodiments, the guide polynucleotide is encoded by a sequence having at least about 80% identity to any one of SEQ ID NOs: 928-949 and 1012-1049. In some embodiments, the guide polynucleotide is encoded by a sequence having at least about 85% identity to any one of SEQ ID NOs: 928-949 and 1012-1049. In some embodiments, the guide polynucleotide is encoded by a sequence having at least about 90% identity to any one of SEQ ID NOs: 928-949 and 1012-1049. In some embodiments, the guide polynucleotide is encoded by a sequence having at least about 95% identity to any one of SEQ ID NOs: 928-949 and 1012-1049. In some embodiments, the guide polynucleotide is encoded by a sequence having at least about 96% identity to any one of SEQ ID NOs: 928-949 and 1012-1049. In some embodiments, the guide polynucleotide is encoded by a sequence having at least about 97% identity to any one of SEQ ID NOs: 928-949 and 1012-1049. In some embodiments, the guide polynucleotide is encoded by a sequence having at least about 98% identity to any one of SEQ ID NOs: 928-949 and 1012-1049. In some embodiments, the guide polynucleotide is encoded by a sequence having at least about 99% identity to any one of SEQ ID NOs: 928-949 and 1012-1049. In some embodiments, the guide polynucleotide is encoded by a sequence having 100% identity to any one of SEQ ID NOs: 928-949 and 1012-1049.

[0287] In some embodiments, the guide polynucleotide hybridizes or targets a sequence complementary to a target nucleic acid sequence within the AAVS1 locus or within an intron of an endogenous gene. In some embodiments, the guide polynucleotide hybridizes or targets a sequence complementary to any one of SEQ ID NOs: 928-949 and 1012-1049 or a sequence having at least 90%, 95%, 97%, 98%, or 99% sequence identity to any one of SEQ ID NOs: 928-949 and 1012-1049. In some embodiments, the guide polynucleotide hybridizes or targets a sequence complementary to a sequence having at least about 80% identity to any one of SEQ ID NOs: 928-949 and 1012-1049. In some embodiments, the guide polynucleotide hybridizes or targets a sequence complementary to a sequence having at least about 85% identity to any one of SEQ ID NOs: 928-949 and 1012-1049. In some embodiments, the guide polynucleotide hybridizes or targets a sequence complementary to a sequence having at least about 90% identity to any one of SEQ ID NOs: 928-949 and 1012-1049. In some embodiments, the guide polynucleotide hybridizes or targets a sequence complementary to a sequence having at least about 95% identity to any one of SEQ ID NOs: 928-949 and 1012-1049. In some embodiments, the guide polynucleotide hybridizes or targets a sequence complementary to a sequence having at least about 96% identity to any one of SEQ ID NOs: 928-949 and 1012-1049. In some embodiments, the guide polynucleotide hybridizes or targets a sequence complementary to a sequence having at least about 97% identity to any one of SEQ ID NOs: 928-949 and 1012-1049. In some embodiments, the guide polynucleotide hybridizes or targets a sequence complementary to a sequence having at least about 98% identity to any one of SEQ ID NOs: 928-949 and 1012-1049. In some embodiments, the guide polynucleotide hybridizes or targets a sequence complementary to a sequence having at least about 99% identity to any one of SEQ ID NOs: 928-949 and 1012-1049. In some embodiments, the guide polynucleotide hybridizes or targets a sequence complementary to a sequence having 100% identity to any one of SEQ ID NOs: 928-949 and 1012-1049.

[0288] In some embodiments, the guide polynucleotide hybridizes or targets a sequence within the AAVS1 locus or within an intron of an endogenous gene. In some embodiments, the guide polynucleotide hybridizes or targets a sequence according to any one of SEQ ID NOs: 950-971 and 1050-1087 or a sequence having at least 90%, 95%, 97%, 98%, or 99% sequence identity to any one of SEQ ID NOs: 950-971 and 1050-1087. In some embodiments, the guide polynucleotide hybridizes or targets a sequence having at least about 80% identity to any one of SEQ ID NOs: 950-971 and 1050-1087. In some embodiments, the guide polynucleotide hybridizes or targets a sequence having at least about 85% identity to any one of SEQ ID NOs: 950-971 and 1050-1087. In some embodiments, the guide polynucleotide hybridizes or targets a sequence having at least about 90% identity to any one of SEQ ID NOs: 950-971 and 1050-1087. In some embodiments, the guide polynucleotide hybridizes or targets a sequence having at least about 95% identity to any one of SEQ ID NOs: 950-971 and 1050-1087. In some embodiments, the guide polynucleotide hybridizes or targets a sequence having at least about 96% identity to any one of SEQ ID NOs: 950-971 and 1050-1087. In some embodiments, the guide polynucleotide hybridizes or targets a sequence having at least about 97% identity to any one of SEQ ID NOs: 950-971 and 1050-1087. In some embodiments, the guide polynucleotide hybridizes or targets a sequence having at least about 98% identity to any one of SEQ ID NOs: 950-971 and 1050-1087. In some embodiments, the guide polynucleotide hybridizes or targets a sequence having at least about 99% identity to any one of SEQ ID NOs: 950-971 and 1050-1087. In some embodiments, the guide polynucleotide hybridizes or targets a sequence having 100% identity to any one of SEQ ID NOs: 950-971 and 1050-1087.

[0289] In some embodiments, the target gene is GPR146. In some embodiments, the guide polynucleotide is encoded by any one of SEQ ID NOs: 1588-1656 or a sequence having at least 90%, 95%, 97%, 98%, or 99% sequence identity to any one of SEQ ID NOs: 1588-1656. In some embodiments, the guide polynucleotide comprises a sequence comprising at least about 46-80 consecutive nucleotides having at least about 20%, at least about 25%, at least about 30%, at least about 35%, at least about 40%, at least about 45%, at least about 50%, at least about 55%, at least about 60%, at least about 65%, at least about 70%, at least about 75%, at least about 80%, at least about 85%, at least about 90%, at least about 91%, at least about 92%, at least about 93%, at least about 94%, at least about 95%, at least about 96%, at least about 97%, at least about 98%, or at least about 99% identity to any one of SEQ ID NOs: 1588-1656. In some embodiments, the guide polynucleotide is encoded by a sequence having at least about 80% identity to any one of SEQ ID NOs: 1588-1656. In some embodiments, the guide polynucleotide is encoded by a sequence having at least about 85% identity to any one of SEQ ID NOs: 1588-1656. In some embodiments, the guide polynucleotide is encoded by a sequence having at least about 90% identity to any one of SEQ ID NOs: 1588-1656. In some embodiments, the guide polynucleotide is encoded by a sequence having at least about 95% identity to any one of SEQ ID NOs: 1588-1656. In some embodiments, the guide polynucleotide is encoded by a sequence having at least about 96% identity to any one of SEQ ID NOs: 1588-1656. In some embodiments, the guide polynucleotide is encoded by a sequence having at least about 97% identity to any one of SEQ ID NOs: 1588-1656. In some embodiments, the guide polynucleotide is encoded by a sequence having at least about 98% identity to any one of SEQ ID NOs: 1588-1656. In some embodiments, the guide polynucleotide is encoded by a sequence having at least about 99% identity to any one of SEQ ID NOs: 1588-1656. In some embodiments, the guide polynucleotide is encoded by a sequence having 100% identity to any one of SEQ ID NOs: 1588-1656.

[0290] In some embodiments, the guide polynucleotide hybridizes or targets a sequence complementary to a target nucleic acid sequence within the GPR146 gene or within an intron of an endogenous gene. In some embodiments, the guide polynucleotide hybridizes or targets a sequence complementary to any one of SEQ ID NOs: 1588-1656 or a sequence having at least 90%, 95%, 97%, 98%, or 99% sequence identity to any one of SEQ ID NOs: 1588-1656. In some embodiments, the guide polynucleotide hybridizes or targets a sequence complementary to a sequence having at least about 80% identity to any one of SEQ ID NOs: 1588-1656. In some embodiments, the guide polynucleotide hybridizes or targets a sequence complementary to a sequence having at least about 85% identity to any one of SEQ ID NOs: 1588-1656. In some embodiments, the guide polynucleotide hybridizes or targets a sequence complementary to a sequence having at least about 90% identity to any one of SEQ ID NOs: 1588-1656. In some embodiments, the guide polynucleotide hybridizes or targets a sequence complementary to a sequence having at least about 95% identity to any one of SEQ ID NOs: 1588-1656. In some embodiments, the guide polynucleotide hybridizes or targets a sequence complementary to a sequence having at least about 96% identity to any one of SEQ ID NOs: 1588-1656. In some embodiments, the guide polynucleotide hybridizes or targets a sequence complementary to a sequence having at least about 97% identity to any one of SEQ ID NOs: 1588-1656. In some embodiments, the guide polynucleotide hybridizes or targets a sequence complementary to a sequence having at least about 98% identity to any one of SEQ ID NOs: 1588-1656. In some embodiments, the guide polynucleotide hybridizes or targets a sequence complementary to a sequence having at least about 99% identity to any one of SEQ ID NOs: 1588-1656. In some embodiments, the guide polynucleotide hybridizes or targets a sequence complementary to a sequence having 100% identity to any one of SEQ ID NOs: 1588-1656.

[0291] In some embodiments, the guide polynucleotide hybridizes or targets a sequence within the GPR146 gene or within an intron of an endogenous gene. In some embodiments, the guide polynucleotide hybridizes or targets a sequence according to any one of SEQ ID NOs: 1657-1725 or a sequence having at least 90%, 95%, 97%, 98%, or 99% sequence identity to any one of SEQ ID NOs: 1657-1725. In some embodiments, the guide polynucleotide hybridizes or targets a sequence having at least about 80% identity to any one of SEQ ID NOs: 1657-1725. In some embodiments, the guide polynucleotide hybridizes or targets a sequence having at least about 85% identity to any one of SEQ ID NOs: 1657-1725.

[0292] In some embodiments, the guide polynucleotide hybridizes or targets a sequence having at least about 90% identity to any one of SEQ ID NOs: 1657-1725. In some embodiments, the guide polynucleotide hybridizes or targets a sequence having at least about 95% identity to any one of SEQ ID NOs: 1657-1725. In some embodiments, the guide polynucleotide hybridizes or targets a sequence having at least about 96% identity to any one of SEQ ID NOs: 1657-1725. In some embodiments, the guide polynucleotide hybridizes or targets a sequence having at least about 97% identity to any one of SEQ ID NOs: 1657-1725. In some embodiments, the guide polynucleotide hybridizes or targets a sequence having at least about 98% identity to any one of SEQ ID NOs: 1657-1725. In some embodiments, the guide polynucleotide hybridizes or targets a sequence having at least about 99% identity to any one of SEQ ID NOs: 1657-1725. In some embodiments, the guide polynucleotide hybridizes or targets a sequence having 100% identity to any one of SEQ ID NOs: 1657-1725.

[0293] In some embodiments, the target gene is APOA1. In some embodiments, the guide polynucleotide is encoded by any one of SEQ ID NOs: 1726-1744, 1764-1774, 1866-1961, and 2058-2088 or a sequence having at least 90%, 95%, 97%, 98%, or 99% sequence identity to any one of SEQ ID NOs: 1726-1744, 1764-1774, 1866-1961, and 2058-2088. In some embodiments, the guide polynucleotide comprises a sequence comprising at least about 46-80 consecutive nucleotides having at least about 20%, at least about 25%, at least about 30%, at least about 35%, at least about 40%, at least about 45%, at least about 50%, at least about 55%, at least about 60%, at least about 65%, at least about 70%, at least about 75%, at least about 80%, at least about 85%, at least about 90%, at least about 91%, at least about 92%, at least about 93%, at least about 94%, at least about 95%, at least about 96%, at least about 97%, at least about 98%, or at least about 99% identity to any one of SEQ ID NOs: 1726-1744, 1764-1774, 1866-1961, and 2058-2088. In some embodiments, the guide polynucleotide is encoded by a sequence having at least about 80% identity to any one of SEQ ID NOs: 1726-1744, 1764-1774, 1866-1961, and 2058-2088. In some embodiments, the guide polynucleotide is encoded by a sequence having at least about 85% identity to any one of SEQ ID NOs: 1726-1744, 1764-1774, 1866-1961, and 2058-2088. In some embodiments, the guide polynucleotide is encoded by a sequence having at least about 90% identity to any one of SEQ ID NOs: 1726-1744, 1764-1774, 1866-1961, and 2058-2088. In some embodiments, the guide polynucleotide is encoded by a sequence having at least about 95% identity to any one of SEQ ID NOs: 1726-1744, 1764-1774, 1866-1961, and 2058-2088. In some embodiments, the guide polynucleotide is encoded by a sequence having at least about 96% identity to any one of SEQ ID NOs: 1726-1744, 1764-1774, 1866-1961, and 2058-2088.

[0294] In some embodiments, the guide polynucleotide is encoded by a sequence having at least about 97% identity to any one of SEQ ID NOs: 1726-1744, 1764-1774, 1866-1961, and 2058-2088. In some embodiments, the guide polynucleotide is encoded by a sequence having at least about 98% identity to any one of SEQ ID NOs: 1726-1744, 1764-1774, 1866-1961, and 2058-2088. In some embodiments, the guide polynucleotide is encoded by a sequence having at least about 99% identity to any one of SEQ ID NOs: 1726-1744, 1764-1774, 1866-1961, and 2058-2088. In some embodiments, the guide polynucleotide is encoded by a sequence having 100% identity to any one of SEQ ID NOs: 1726-1744, 1764-1774, 1866-1961, and 2058-2088.

[0295] In some embodiments, the guide polynucleotide hybridizes or targets a sequence complementary to a target nucleic acid sequence within the APOA1 gene or within an intron of an endogenous gene. In some embodiments, the guide polynucleotide hybridizes or targets a sequence complementary to any one of SEQ ID NOs: 1726-1744, 1764-1774, 1866-1961, and 2058-2088 or a sequence having at least 90%, 95%, 97%, 98%, or 99% sequence identity to any one of SEQ ID NOs: 1726-1744, 1764-1774, 1866-1961, and 2058-2088. In some embodiments, the guide polynucleotide hybridizes or targets a sequence complementary to a sequence having at least about 80% identity to any one of SEQ ID NOs: 1726-1744, 1764-1774, 1866-1961, and 2058-2088. In some embodiments, the guide polynucleotide hybridizes or targets a sequence complementary to a sequence having at least about 85% identity to any one of SEQ ID NOs: 1726-1744, 1764-1774, 1866-1961, and 2058-2088. In some embodiments, the guide polynucleotide hybridizes or targets a sequence complementary to a sequence having at least about 90% identity to any one of SEQ ID NOs: 1726-1744, 1764-1774, 1866-1961, and 2058-2088. In some embodiments, the guide polynucleotide hybridizes or targets a sequence complementary to a sequence having at least about 95% identity to any one of SEQ ID NOs: 1726-1744, 1764-1774, 1866-1961, and 2058-2088. In some embodiments, the guide polynucleotide hybridizes or targets a sequence complementary to a sequence having at least about 96% identity to any one of SEQ ID NOs: 1726-1744, 1764-1774, 1866-1961, and 2058-2088. In some embodiments, the guide polynucleotide hybridizes or targets a sequence complementary to a sequence having at least about 97% identity to any one of SEQ ID NOs: 1726-1744, 1764-1774, 1866-1961, and 2058-2088. In some embodiments, the guide polynucleotide hybridizes or targets a sequence complementary to a sequence having at least about 98% identity to any one of SEQ ID NOs: 1726-1744, 1764-1774, 1866-1961, and 2058-2088. In some embodiments, the guide polynucleotide hybridizes or targets a sequence complementary to a sequence having at least about 99% identity to any one of SEQ ID NOs: 1726-1744, 1764-1774, 1866-1961, and 2058-2088. In some embodiments, the guide polynucleotide hybridizes or targets a sequence complementary to a sequence having 100% identity to any one of SEQ ID NOs: 1726-1744, 1764-1774, 1866-1961, and 2058-2088.

[0296] In some embodiments, the guide polynucleotide hybridizes or targets a sequence within the APOA1 gene or within an intron of an endogenous gene. In some embodiments, the guide polynucleotide hybridizes or targets a sequence according to any one of SEQ ID NOs: 1745-1763, 1775-1785, 1962-2057, and 2089-2119 or a sequence having at least 90%, 95%, 97%, 98%, or 99% sequence identity to any one of SEQ ID NOs: 1745-1763, 1775-1785, 1962-2057, and 2089-2119. In some embodiments, the guide polynucleotide hybridizes or targets a sequence having at least about 80% identity to any one of SEQ ID NOs: 1745-1763, 1775-1785, 1962-2057, and 2089-2119. In some embodiments, the guide polynucleotide hybridizes or targets a sequence having at least about 85% identity to any one of SEQ ID NOs: 1745-1763, 1775-1785, 1962-2057, and 2089-2119. In some embodiments, the guide polynucleotide hybridizes or targets a sequence having at least about 90% identity to any one of SEQ ID NOs: 1745-1763, 1775-1785, 1962-2057, and 2089-2119. In some embodiments, the guide polynucleotide hybridizes or targets a sequence having at least about 95% identity to any one of SEQ ID NOs: 1745-1763, 1775-1785, 1962-2057, and 2089-2119.

[0297] In some embodiments, the guide polynucleotide hybridizes or targets a sequence having at least about 96% identity to any one of SEQ ID NOs: 1745-1763, 1775-1785, 1962-2057, and 2089-2119. In some embodiments, the guide polynucleotide hybridizes or targets a sequence having at least about 97% identity to any one of SEQ ID NOs: 1745-1763, 1775-1785, 1962-2057, and 2089-2119. In some embodiments, the guide polynucleotide hybridizes or targets a sequence having at least about 98% identity to any one of SEQ ID NOs: 1745-1763, 1775-1785, 1962-2057, and 2089-2119. In some embodiments, the guide polynucleotide hybridizes or targets a sequence having at least about 99% identity to any one of SEQ ID NOs: 1745-1763, 1775-1785, 1962-2057, and 2089-2119. In some embodiments, the guide polynucleotide hybridizes or targets a sequence having 100% identity to any one of SEQ ID NOs: 1745-1763, 1775-1785, 1962-2057, and 2089-2119.

[0298] In some embodiments, the target gene is HAO1. In some embodiments, the guide polynucleotide is encoded by any one of SEQ ID NOs: 611-633, 1789-1826, and 1827-1865 or a sequence having at least 90%, 95%, 97%, 98%, or 99% sequence identity to any one of SEQ ID NOs: 611-633, 1789-1826, and 1827-1865. In some embodiments, the guide polynucleotide comprises a sequence comprising at least about 46-80 consecutive nucleotides having at least about 20%, at least about 25%, at least about 30%, at least about 35%, at least about 40%, at least about 45%, at least about 50%, at least about 55%, at least about 60%, at least about 65%, at least about 70%, at least about 75%, at least about 80%, at least about 85%, at least about 90%, at least about 91%, at least about 92%, at least about 93%, at least about 94%, at least about 95%, at least about 96%, at least about 97%, at least about 98%, or at least about 99% identity to any one of SEQ ID NOs: 611-633, 1789-1826, and 1827-1865.

[0299] In some embodiments, the guide polynucleotide is encoded by a sequence having at least about 80% identity to any one of SEQ ID NOs: 611-633, 1789-1826, and 1827-1865. In some embodiments, the guide polynucleotide is encoded by a sequence having at least about 85% identity to any one of SEQ ID NOs: 611-633, 1789-1826, and 1827-1865. In some embodiments, the guide polynucleotide is encoded by a sequence having at least about 90% identity to any one of SEQ ID NOs: 611-633, 1789-1826, and 1827-1865. In some embodiments, the guide polynucleotide is encoded by a sequence having at least about 95% identity to any one of SEQ ID NOs: 611-633, 1789-1826, and 1827-1865. In some embodiments, the guide polynucleotide is encoded by a sequence having at least about 96% identity to any one of SEQ ID NOs: 611-633, 1789-1826, and 1827-1865. In some embodiments, the guide polynucleotide is encoded by a sequence having at least about 97% identity to any one of SEQ ID NOs: 611-633, 1789-1826, and 1827-1865. In some embodiments, the guide polynucleotide is encoded by a sequence having at least about 98% identity to any one of SEQ ID NOs: 611-633, 1789-1826, and 1827-1865. In some embodiments, the guide polynucleotide is encoded by a sequence having at least about 99% identity to any one of SEQ ID NOs: 611-633, 1789-1826, and 1827-1865. In some embodiments, the guide polynucleotide is encoded by a sequence having 100% identity to any one of SEQ ID NOs: 611-633, 1789-1826, and 1827-1865.

[0300] In some embodiments, the guide polynucleotide hybridizes or targets a sequence complementary to a target nucleic acid sequence within the HAO1 gene or within an intron of an endogenous gene. In some embodiments, the guide polynucleotide hybridizes or targets a sequence complementary to any one of SEQ ID NOs: 611-633, 1789-1826, and 1827-1865 or a sequence having at least 90%, 95%, 97%, 98%, or 99% sequence identity to any one of SEQ ID NOs: 611-633, 1789-1826, and 1827-1865. In some embodiments, the guide polynucleotide hybridizes or targets a sequence complementary to a sequence having at least about 80% identity to any one of SEQ ID NOs: 611-633, 1789-1826, and 1827-1865. In some embodiments, the guide polynucleotide hybridizes or targets a sequence complementary to a sequence having at least about 85% identity to any one of SEQ ID NOs: 611-633, 1789-1826, and 1827-1865. In some embodiments, the guide polynucleotide hybridizes or targets a sequence complementary to a sequence having at least about 90% identity to any one of SEQ ID NOs: 611-633, 1789-1826, and 1827-1865. In some embodiments, the guide polynucleotide hybridizes or targets a sequence complementary to a sequence having at least about 95% identity to any one of SEQ ID NOs: 611-633, 1789-1826, and 1827-1865. In some embodiments, the guide polynucleotide hybridizes or targets a sequence complementary to a sequence having at least about 96% identity to any one of SEQ ID NOs: 611-633, 1789-1826, and 1827-1865. In some embodiments, the guide polynucleotide hybridizes or targets a sequence complementary to a sequence having at least about 97% identity to any one of SEQ ID NOs: 611-633, 1789-1826, and 1827-1865. In some embodiments, the guide polynucleotide hybridizes or targets a sequence complementary to a sequence having at least about 98% identity to any one of SEQ ID NOs: 611-633, 1789-1826, and 1827-1865. In some embodiments, the guide polynucleotide hybridizes or targets a sequence complementary to a sequence having at least about 99% identity to any one of SEQ ID NOs: 611-633, 1789-1826, and 1827-1865. In some embodiments, the guide polynucleotide hybridizes or targets a sequence complementary to a sequence having 100% identity to any one of SEQ ID NOs: 611-633, 1789-1826, and 1827-1865.

[0301] In some embodiments, the guide polynucleotides (e.g., guide RNAs) comprise various structural elements including but not limited to: a spacer sequence which binds to the protospacer sequence (target sequence), a crRNA, and an optional tracrRNA. In some embodiments, the genome editing system comprises a CRISPR guide RNA. In some embodiments, the guide RNA comprises a crRNA comprising a spacer sequence. In some embodiments, the guide RNA additionally comprises a tracrRNA or a modified tracrRNA.

[0302] In some embodiments, the systems provided herein comprise one or more guide RNAs. In some embodiments, the guide RNA comprises a sense sequence. In some embodiments, the guide RNA comprises an anti-sense sequence. In some embodiments, the guide RNA comprises nucleotide sequences other than the region complementary to or substantially complementary to a region of a target sequence. For example, a crRNA is part or considered part of a guide RNA, or is comprised in a guide RNA, e.g., a crRNA:tracrRNA chimera.

[0303] In some embodiments, the guide RNA comprises synthetic nucleotides or modified nucleotides. In some embodiments, the guide RNA comprises one or more inter-nucleoside linkers modified from the natural phosphodiester. In some embodiments, all of the inter-nucleoside linkers of the guide RNA, or contiguous nucleotide sequence thereof, are modified. For example, in some embodiments, the inter nucleoside linkage comprises Sulphur (S), such as a phosphorothioate inter-nucleoside linkage. In some embodiments, the guide RNA comprises greater than about 10%, 25%, 50%, 75%, or 90% modified inter-nucleoside linkers. In some embodiments, the guide RNA comprises 1, 2, 3, 4, 5, 6, 7, 8, 9, 10, or more than 10 modified inter-nucleoside linkers (e.g., phosphorothioate inter-nucleoside linkage).

[0304] In some embodiments, the guide RNA comprises modifications to a ribose sugar or nucleobase. In some embodiments, the guide RNA comprises one or more nucleosides comprising a modified sugar moiety, wherein the modified sugar moiety is a modification of the sugar moiety when compared to the ribose sugar moiety found in deoxyribose nucleic acid (DNA) and RNA. In some embodiments, the modification is within the ribose ring structure. Exemplary modifications include, but are not limited to, replacement with a hexose ring (HNA), a bicyclic ring having a biradical bridge between the C2 and C4 carbons on the ribose ring (e.g., locked nucleic acids (LNA)), or an unlinked ribose ring which typically lacks a bond between the C2 and C3 carbons (e.g., UNA). In some embodiments, the sugar-modified nucleosides comprise bicyclohexose nucleic acids or tricyclic nucleic acids. In some embodiments, the modified nucleosides comprise nucleosides where the sugar moiety is replaced with a non-sugar moiety, for example peptide nucleic acids (PNA) or morpholino nucleic acids.

[0305] In some embodiments, the guide RNA comprises one or more modified sugars. In some embodiments, the sugar modifications comprise modifications made by altering the substituent groups on the ribose ring to groups other than hydrogen, or the 2′—OH group naturally found in DNA and RNA nucleosides. In some embodiments, substituents are introduced at the 2′, 3′, 4′, 5′ positions, or combinations thereof. In some embodiments, nucleosides with modified sugar moieties comprise 2′ modified nucleosides, e.g., 2′ substituted nucleosides. A 2′ sugar modified nucleoside, in some embodiments, is a nucleoside that has a substituent other than H or —OH at the 2′ position (2′ substituted nucleoside) or comprises a 2′ linked biradical, and comprises 2′ substituted nucleosides and LNA (2′-4′ biradical bridged) nucleosides. Examples of 2′-substituted modified nucleosides comprise, but are not limited to, 2′-O-alkyl-RNA, 2′-O-methyl-RNA, 2′-alkoxy-RNA, 2′-O-methoxyethyl-RNA (MOE), 2′-amino-DNA, 2′-Fluoro-RNA, and 2′-F-ANA nucleoside. In some embodiments, the modification in the ribose group comprises a modification at the 2′ position of the ribose group. In some embodiments, the modification at the 2′ position of the ribose group is selected from the group consisting of 2′-O-methyl, 2′-fluoro, 2′-deoxy, and 2′-O-(2-methoxyethyl).

[0306] In some embodiments, the guide RNA comprises one or more modified sugars. In some embodiments, the guide RNA comprises only modified sugars. In some embodiments, the guide RNA comprises greater than about 10%, 25%, 50%, 75%, or 90% modified sugars.

[0307] In some embodiments, the modified sugar is a bicyclic sugar. In some embodiments, the modified sugar comprises a 2′-O-methyl. In some embodiments, the modified sugar comprises a 2′-fluoro. In some embodiments, the modified sugar comprises a 2′-O-methoxyethyl group. In some embodiments, the guide RNA comprises 1, 2, 3, 4, 5, 6, 7, 8, 9, 10, or more than 10 modified sugars (e.g., comprising a 2′-O-methyl or 2′-fluoro).

[0308] In some embodiments, the guide RNA comprises both inter-nucleoside linker modifications and nucleoside modifications. In some embodiments, the guide RNA comprises greater than about 10%, 25%, 50%, 75%, or 90% modified inter-nucleoside linkers and greater than about 10%, 25%, 50%, 75%, or 90% modified sugars. In some embodiments, the guide RNA comprises 1, 2, 3, 4, 5, 6, 7, 8, 9, 10, or more than 10 modified inter-nucleoside linkers (e.g., phosphorothioate inter-nucleoside linkage) and 1, 2, 3, 4, 5, 6, 7, 8, 9, 10, or more than 10 modified sugars (e.g., comprising a 2′-O-methyl or 2′-fluoro).

[0309] In some cases, the guide RNA comprises a sequence complementary to a eukaryotic, fungal, plant, mammalian, or human genomic polynucleotide sequence. In some cases, the guide RNA comprises a sequence complementary to a eukaryotic genomic polynucleotide sequence. In some cases, the guide RNA comprises a sequence complementary to a fungal genomic polynucleotide sequence. In some cases, the guide RNA comprises a sequence complementary to a plant genomic polynucleotide sequence. In some cases, the guide RNA comprises a sequence complementary to a mammalian genomic polynucleotide sequence. In some cases, the guide RNA comprises a sequence complementary to a human genomic polynucleotide sequence.

[0310] In some embodiments, the guide RNA is 30-250 nucleotides in length. In some embodiments, the guide RNA is more than 90 nucleotides in length. In some embodiments, the guide RNA is less than 245 nucleotides in length. In some embodiments, the guide RNA is 30, 40, 50, 60, 70, 80, 90, 100, 120, 140, 160, 180, 200, 220, 240, or more than 240 nucleotides in length. In some embodiments, the guide RNA is about 30 to about 40, about 30 to about 50, about 30 to about 60, about 30 to about 70, about 30 to about 80, about 30 to about 90, about 30 to about 100, about 30 to about 120, about 30 to about 140, about 30 to about 160, about 30 to about 180, about 30 to about 200, about 30 to about 220, about 30 to about 240, about 50 to about 60, about 50 to about 70, about 50 to about 80, about 50 to about 90, about 50 to about 100, about 50 to about 120, about 50 to about 140, about 50 to about 160, about 50 to about 180, about 50 to about 200, about 50 to about 220, about 50 to about 240, about 100 to about 120, about 100 to about 140, about 100 to about 160, about 100 to about 180, about 100 to about 200, about 100 to about 220, about 100 to about 240, about 160 to about 180, about 160 to about 200, about 160 to about 220, or about 160 to about 240 nucleotides in length.

### MG Endonuclease Systems

[0311] Described herein, in certain embodiments, are engineered nuclease systems comprising an engineered endonuclease and an engineered guide polynucleotide configured to form a complex with the endonuclease and to hybridize to a target nucleic acid sequence.

[0312] In some embodiments, the engineered nuclease system comprises an engineered endonuclease comprising a sequence having at least about 70% identity to any one of SEQ ID NOs: 1-27 and 771-862 and an engineered guide polynucleotide. In some embodiments, the engineered nuclease system comprises an engineered endonuclease comprising a sequence having at least about 75% identity to any one of SEQ ID NOs: 1-27 and 771-862 and an engineered guide polynucleotide. In some embodiments, the engineered nuclease system comprises an engineered endonuclease comprising a sequence having at least about 80% identity to any one of SEQ ID NOs: 1-27 and 771-862 and an engineered guide polynucleotide. In some embodiments, the engineered nuclease system comprises an engineered endonuclease comprising a sequence having at least about 85% identity to any one of SEQ ID NOs: 1-27 and 771-862 and an engineered guide polynucleotide. In some embodiments, the engineered nuclease system comprises an engineered endonuclease comprising a sequence having at least about 90% identity to any one of SEQ ID NOs: 1-27 and 771-862 and an engineered guide polynucleotide. In some embodiments, the engineered nuclease system comprises an engineered endonuclease comprising a sequence having at least about 95% identity to any one of SEQ ID NOs: 1-27 and 771-862 and an engineered guide polynucleotide. In some embodiments, the engineered nuclease system comprises an engineered endonuclease comprising a sequence having at least about 96% identity to any one of SEQ ID NOs: 1-27 and 771-862 and an engineered guide polynucleotide. In some embodiments, the engineered nuclease system comprises an engineered endonuclease comprising a sequence having at least about 97% identity to any one of SEQ ID NOs: 1-27 and 771-862 and an engineered guide polynucleotide. In some embodiments, the engineered nuclease system comprises an engineered endonuclease comprising a sequence having at least about 98% identity to any one of SEQ ID NOs: 1-27 and 771-862 and an engineered guide polynucleotide. In some embodiments, the engineered nuclease system comprises an engineered endonuclease comprising a sequence having at least about 99% identity to any one of SEQ ID NOs: 1-27 and 771-862 and an engineered guide polynucleotide. In some embodiments, the engineered nuclease system comprises an engineered endonuclease comprising 100% identity to any one of SEQ ID NOs: 1-27 and 771-862 and an engineered guide polynucleotide.

[0313] In some embodiments, the engineered nuclease system comprises an engineered endonuclease comprising a sequence having at least about 70% identity to any one of SEQ ID NOs: 109-110 and 2842-2854 and an engineered guide polynucleotide. In some embodiments, the engineered nuclease system comprises an engineered endonuclease comprising a sequence having at least about 75% identity to any one of SEQ ID NOs: 109-110 and 2842-2854 and an engineered guide polynucleotide. In some embodiments, the engineered nuclease system comprises an engineered endonuclease comprising a sequence having at least about 80% identity to any one of SEQ ID NOs: 109-110 and 2842-2854 and an engineered guide polynucleotide. In some embodiments, the engineered nuclease system comprises an engineered endonuclease comprising a sequence having at least about 85% identity to any one of SEQ ID NOs: 109-110 and 2842-2854 and an engineered guide polynucleotide. In some embodiments, the engineered nuclease system comprises an engineered endonuclease comprising a sequence having at least about 90% identity to any one of SEQ ID NOs: 109-110 and 2842-2854 and an engineered guide polynucleotide. In some embodiments, the engineered nuclease system comprises an engineered endonuclease comprising a sequence having at least about 95% identity to any one of SEQ ID NOs: 109-110 and 2842-2854 and an engineered guide polynucleotide. In some embodiments, the engineered nuclease system comprises an engineered endonuclease comprising a sequence having at least about 96% identity to any one of SEQ ID NOs: 109-110 and 2842-2854 and an engineered guide polynucleotide. In some embodiments, the engineered nuclease system comprises an engineered endonuclease comprising a sequence having at least about 97% identity to any one of SEQ ID NOs: 109-110 and 2842-2854 and an engineered guide polynucleotide. In some embodiments, the engineered nuclease system comprises an engineered endonuclease comprising a sequence having at least about 98% identity to any one of SEQ ID NOs: 109-110 and 2842-2854 and an engineered guide polynucleotide. In some embodiments, the engineered nuclease system comprises an engineered endonuclease comprising a sequence having at least about 99% identity to any one of SEQ ID NOs: 109-110 and 2842-2854 and an engineered guide polynucleotide. In some embodiments, the engineered nuclease system comprises an engineered endonuclease comprising 100% identity to any one of SEQ ID NOs: 109-110 and 2842-2854 and an engineered guide polynucleotide.

[0314] In some embodiments, the engineered guide polynucleotide is a single guide nucleic acid. In some embodiments, the engineered guide polynucleotide is a dual guide nucleic acid.

[0315] In some embodiments, the engineered guide polynucleotide is RNA. In some embodiments, the engineered endonuclease binds non-covalently to the engineered guide polynucleotide. In some embodiments, the endonuclease is covalently linked to the engineered guide polynucleotide.

[0316] In some embodiments, the engineered nuclease system comprises an endonuclease comprising a sequence having at least about 70% identity to any one of SEQ ID NOs: 1-27 and 771-862 and an engineered guide polynucleotide configured to form a complex with the endonuclease and comprising a spacer sequence configured to hybridize to at least a portion of a target nucleic acid sequence within an albumin gene or within an intron of an endogenous gene, the engineered guide polynucleotide comprising a sequence having at least about 70% identity to any one of SEQ ID NOs: 67-86. In some embodiments, the engineered nuclease system comprises an endonuclease comprising a sequence having at least about 75% identity to any one of SEQ ID NOs: 1-27 and 771-862 and an engineered guide polynucleotide configured to form a complex with the endonuclease and comprising a spacer sequence configured to hybridize to at least a portion of a target nucleic acid sequence within an albumin gene or within an intron of an endogenous gene, the engineered guide polynucleotide comprising a sequence having at least about 75% identity to any one of SEQ ID NOs: 67-86. In some embodiments, the engineered nuclease system comprises an endonuclease comprising a sequence having at least about 80% identity to any one of SEQ ID NOs: 1-27 and 771-862 and an engineered guide polynucleotide configured to form a complex with the endonuclease and comprising a spacer sequence configured to hybridize to at least a portion of a target nucleic acid sequence within an albumin gene or within an intron of an endogenous gene, the engineered guide polynucleotide comprising a sequence having at least about 80% identity to any one of SEQ ID NOs: 67-86. In some embodiments, the engineered nuclease system comprises an endonuclease comprising a sequence having at least about 85% identity to any one of SEQ ID NOs: 1-27 and 771-862 and an engineered guide polynucleotide configured to form a complex with the endonuclease and comprising a spacer sequence configured to hybridize to at least a portion of a target nucleic acid sequence within an albumin gene or within an intron of an endogenous gene, the engineered guide polynucleotide comprising a sequence having at least about 85% identity to any one of SEQ ID NOs: 67-86. In some embodiments, the engineered nuclease system comprises an endonuclease comprising a sequence having at least about 90% identity to any one of SEQ ID NOs: 1-27 and 771-862 and an engineered guide polynucleotide configured to form a complex with the endonuclease and comprising a spacer sequence configured to hybridize to at least a portion of a target nucleic acid sequence within an albumin gene or within an intron of an endogenous gene, the engineered guide polynucleotide comprising a sequence having at least about 90% identity to any one of SEQ ID NOs: 67-86. In some embodiments, the engineered nuclease system comprises an endonuclease comprising a sequence having at least about 95% identity to any one of SEQ ID NOs: 1-27 and 771-862 and an engineered guide polynucleotide configured to form a complex with the endonuclease and comprising a spacer sequence configured to hybridize to at least a portion of a target nucleic acid sequence within an albumin gene or within an intron of an endogenous gene, the engineered guide polynucleotide comprising a sequence having at least about 95% identity to any one of SEQ ID NOs: 67-86. In some embodiments, the engineered nuclease system comprises an endonuclease comprising a sequence having at least about 96% identity to any one of SEQ ID NOs: 1-27 and 771-862 and an engineered guide polynucleotide configured to form a complex with the endonuclease and comprising a spacer sequence configured to hybridize to at least a portion of a target nucleic acid sequence within an albumin gene or within an intron of an endogenous gene, the engineered guide polynucleotide comprising a sequence having at least about 96% identity to any one of SEQ ID NOs: 67-86. In some embodiments, the engineered nuclease system comprises an endonuclease comprising a sequence having at least about 97% identity to any one of SEQ ID NOs: 1-27 and 771-862 and an engineered guide polynucleotide configured to form a complex with the endonuclease and comprising a spacer sequence configured to hybridize to at least a portion of a target nucleic acid sequence within an albumin gene or within an intron of an endogenous gene, the engineered guide polynucleotide comprising a sequence having at least about 97% identity to any one of SEQ ID NOs: 67-86. In some embodiments, the engineered nuclease system comprises an endonuclease comprising a sequence having at least about 98% identity to any one of SEQ ID NOs: 1-27 and 771-862 and an engineered guide polynucleotide configured to form a complex with the endonuclease and comprising a spacer sequence configured to hybridize to at least a portion of a target nucleic acid sequence within an albumin gene or within an intron of an endogenous gene, the engineered guide polynucleotide comprising a sequence having at least about 98% identity to any one of SEQ ID NOs: 67-86. In some embodiments, the engineered nuclease system comprises an endonuclease comprising a sequence having at least about 99% identity to any one of SEQ ID NOs: 1-27 and 771-862 and an engineered guide polynucleotide configured to form a complex with the endonuclease and comprising a spacer sequence configured to hybridize to at least a portion of a target nucleic acid sequence within an albumin gene or within an intron of an endogenous gene, the engineered guide polynucleotide comprising a sequence having at least about 99% identity to any one of SEQ ID NOs: 67-86. In some embodiments, the engineered nuclease system comprises an endonuclease comprising 100% identity to any one of SEQ ID NOs: 1-27 and 771-862 and an engineered guide polynucleotide configured to form a complex with the endonuclease and comprising a spacer sequence configured to hybridize to at least a portion of a target nucleic acid sequence within an albumin gene or within an intron of an endogenous gene, the engineered guide polynucleotide comprising 100% identity to any one of SEQ ID NOs: 67-86. In some embodiments, the guide polynucleotide hybridizes or targets a sequence complementary to any one of SEQ ID NOs: 67-86 or a sequence having at least 90%, 95%, 97%, 98%, or 99% sequence identity to any one of SEQ ID NOs: 67-86.

[0317] In some embodiments, the engineered nuclease system comprises an endonuclease comprising a sequence having at least about 70% identity to any one of SEQ ID NOs: 1-27 and 771-862 and an engineered guide polynucleotide configured to form a complex with the endonuclease and comprising a spacer sequence configured to hybridize to at least a portion of a target nucleic acid sequence within a TRAC gene or within an intron of an endogenous gene, the engineered guide polynucleotide comprising a sequence having at least about 70% identity to any one of SEQ ID NOs: 119-138, 922-924, 972-991, 1088-1183, 1280-1320, 2390-2485, and 2582-2617. In some embodiments, the engineered nuclease system comprises an endonuclease comprising a sequence having at least about 75% identity to any one of SEQ ID NOs: 1-27 and 771-862 and an engineered guide polynucleotide configured to form a complex with the endonuclease and comprising a spacer sequence configured to hybridize to at least a portion of a target nucleic acid sequence within a TRAC gene or within an intron of an endogenous gene, the engineered guide polynucleotide comprising a sequence having at least about 75% identity to any one of SEQ ID NOs: 119-138, 922-924, 972-991, 1088-1183, 1280-1320, 2390-2485, and 2582-2617. In some embodiments, the engineered nuclease system comprises an endonuclease comprising a sequence having at least about 80% identity to any one of SEQ ID NOs: 1-27 and 771-862 and an engineered guide polynucleotide configured to form a complex with the endonuclease and comprising a spacer sequence configured to hybridize to at least a portion of a target nucleic acid sequence within a TRAC gene or within an intron of an endogenous gene, the engineered guide polynucleotide comprising a sequence having at least about 80% identity to any one of SEQ ID NOs: 119-138, 922-924, 972-991, 1088-1183, 1280-1320, 2390-2485, and 2582-2617. In some embodiments, the engineered nuclease system comprises an endonuclease comprising a sequence having at least about 85% identity to any one of SEQ ID NOs: 1-27 and 771-862 and an engineered guide polynucleotide configured to form a complex with the endonuclease and comprising a spacer sequence configured to hybridize to at least a portion of a target nucleic acid sequence within a TRAC gene or within an intron of an endogenous gene, the engineered guide polynucleotide comprising a sequence having at least about 85% identity to any one of SEQ ID NOs: 119-138, 922-924, 972-991, 1088-1183, 1280-1320, 2390-2485, and 2582-2617. In some embodiments, the engineered nuclease system comprises an endonuclease comprising a sequence having at least about 90% identity to any one of SEQ ID NOs: 1-27 and 771-862 and an engineered guide polynucleotide configured to form a complex with the endonuclease and comprising a spacer sequence configured to hybridize to at least a portion of a target nucleic acid sequence within a TRAC gene or within an intron of an endogenous gene, the engineered guide polynucleotide comprising a sequence having at least about 90% identity to any one of SEQ ID NOs: 119-138, 922-924, 972-991, 1088-1183, 1280-1320, 2390-2485, and 2582-2617. In some embodiments, the engineered nuclease system comprises an endonuclease comprising a sequence having at least about 95% identity to any one of SEQ ID NOs: 1-27 and 771-862 and an engineered guide polynucleotide configured to form a complex with the endonuclease and comprising a spacer sequence configured to hybridize to at least a portion of a target nucleic acid sequence within a TRAC gene or within an intron of an endogenous gene, the engineered guide polynucleotide comprising a sequence having at least about 95% identity to any one of SEQ ID NOs: 119-138, 922-924, 972-991, 1088-1183, 1280-1320, 2390-2485, and 2582-2617. In some embodiments, the engineered nuclease system comprises an endonuclease comprising a sequence having at least about 96% identity to any one of SEQ ID NOs: 1-27 and 771-862 and an engineered guide polynucleotide configured to form a complex with the endonuclease and comprising a spacer sequence configured to hybridize to at least a portion of a target nucleic acid sequence within a TRAC gene or within an intron of an endogenous gene, the engineered guide polynucleotide comprising a sequence having at least about 96% identity to any one of SEQ ID NOs: 119-138, 922-924, 972-991, 1088-1183, 1280-1320, 2390-2485, and 2582-2617. In some embodiments, the engineered nuclease system comprises an endonuclease comprising a sequence having at least about 97% identity to any one of SEQ ID NOs: 1-27 and 771-862 and an engineered guide polynucleotide configured to form a complex with the endonuclease and comprising a spacer sequence configured to hybridize to at least a portion of a target nucleic acid sequence within a TRAC gene or within an intron of an endogenous gene, the engineered guide polynucleotide comprising a sequence having at least about 97% identity to any one of SEQ ID NOs: 119-138, 922-924, 972-991, 1088-1183, 1280-1320, 2390-2485, and 2582-2617. In some embodiments, the engineered nuclease system comprises an endonuclease comprising a sequence having at least about 98% identity to any one of SEQ ID NOs: 1-27 and 771-862 and an engineered guide polynucleotide configured to form a complex with the endonuclease and comprising a spacer sequence configured to hybridize to at least a portion of a target nucleic acid sequence within a TRAC gene or within an intron of an endogenous gene, the engineered guide polynucleotide comprising a sequence having at least about 98% identity to any one of SEQ ID NOs: 119-138, 922-924, 972-991, 1088-1183, 1280-1320, 2390-2485, and 2582-2617. In some embodiments, the engineered nuclease system comprises an endonuclease comprising a sequence having at least about 99% identity to any one of SEQ ID NOs: 1-27 and 771-862 and an engineered guide polynucleotide configured to form a complex with the endonuclease and comprising a spacer sequence configured to hybridize to at least a portion of a target nucleic acid sequence within a TRAC gene or within an intron of an endogenous gene, the engineered guide polynucleotide comprising a sequence having at least about 99% identity to any one of SEQ ID NOs: 119-138, 922-924, 972-991, 1088-1183, 1280-1320, 2390-2485, and 2582-2617. In some embodiments, the engineered nuclease system comprises an endonuclease comprising 100% identity to any one of SEQ ID NOs: 1-27 and 771-862 and an engineered guide polynucleotide configured to form a complex with the endonuclease and comprising a spacer sequence configured to hybridize to at least a portion of a target nucleic acid sequence within a TRAC gene or within an intron of an endogenous gene, the engineered guide polynucleotide comprising 100% identity to any one of SEQ ID NOs: 119-138, 922-924, 972-991, 1088-1183, 1280-1320, 2390-2485, and 2582-2617. In some embodiments, the guide polynucleotide hybridizes or targets a sequence complementary to any one of SEQ ID NOs: 119-138, 922-924, 972-991, 1088-1183, 1280-1320, 2390-2485, and 2582-2617 or a sequence having at least 90%, 95%, 97%, 98%, or 99% sequence identity to any one of SEQ ID NOs: 119-138, 922-924, 972-991, 1088-1183, 1280-1320, 2390-2485, and 2582-2617.

[0318] In some embodiments, the guide polynucleotide hybridizes or targets a sequence according to any one of SEQ ID NOs: 139-158, 925-927, 992-1011, 1184-1279, 1321-1361, 2486-2581, and 2618-2653 or a sequence having at least 90%, 95%, 97%, 98%, or 99% sequence identity to any one of SEQ ID NOs: 139-158, 925-927, 992-1011, 1184-1279, 1321-1361, 2486-2581, and 2618-2653. In some embodiments, the target nucleic acid sequence comprises a sequence having at least 90% sequence identity to any one of SEQ ID NOs: 139-158, 925-927, 992-1011, 1184-1279, 1321-1361, 2486-2581, and 2618-2653.

[0319] In some embodiments, the engineered nuclease system comprises an endonuclease comprising a sequence having at least about 70% identity to any one of SEQ ID NOs: 1-27 and 771-862 and an engineered guide polynucleotide configured to form a complex with the endonuclease and comprising a spacer sequence configured to hybridize to at least a portion of a target nucleic acid sequence within a B2M gene or within an intron of an endogenous gene, the engineered guide polynucleotide comprising a sequence having at least about 70% identity to any one of SEQ ID NOs: 159-184. In some embodiments, the engineered nuclease system comprises an endonuclease comprising a sequence having at least about 75% identity to any one of SEQ ID NOs: 1-27 and 771-862 and an engineered guide polynucleotide configured to form a complex with the endonuclease and comprising a spacer sequence configured to hybridize to at least a portion of a target nucleic acid sequence within a B2M gene or within an intron of an endogenous gene, the engineered guide polynucleotide comprising a sequence having at least about 75% identity to any one of SEQ ID NOs: 159-184. In some embodiments, the engineered nuclease system comprises an endonuclease comprising a sequence having at least about 80% identity to any one of SEQ ID NOs: 1-27 and 771-862 and an engineered guide polynucleotide configured to form a complex with the endonuclease and comprising a spacer sequence configured to hybridize to at least a portion of a target nucleic acid sequence within a B2M gene or within an intron of an endogenous gene, the engineered guide polynucleotide comprising a sequence having at least about 80% identity to any one of SEQ ID NOs: 159-184. In some embodiments, the engineered nuclease system comprises an endonuclease comprising a sequence having at least about 85% identity to any one of SEQ ID NOs: 1-27 and 771-862 and an engineered guide polynucleotide configured to form a complex with the endonuclease and comprising a spacer sequence configured to hybridize to at least a portion of a target nucleic acid sequence within a B2M gene or within an intron of an endogenous gene, the engineered guide polynucleotide comprising a sequence having at least about 85% identity to any one of SEQ ID NOs: 159-184. In some embodiments, the engineered nuclease system comprises an endonuclease comprising a sequence having at least about 90% identity to any one of SEQ ID NOs: 1-27 and 771-862 and an engineered guide polynucleotide configured to form a complex with the endonuclease and comprising a spacer sequence configured to hybridize to at least a portion of a target nucleic acid sequence within a B2M gene or within an intron of an endogenous gene, the engineered guide polynucleotide comprising a sequence having at least about 90% identity to any one of SEQ ID NOs: 159-184. In some embodiments, the engineered nuclease system comprises an endonuclease comprising a sequence having at least about 95% identity to any one of SEQ ID NOs: 1-27 and 771-862 and an engineered guide polynucleotide configured to form a complex with the endonuclease and comprising a spacer sequence configured to hybridize to at least a portion of a target nucleic acid sequence within a B2M gene or within an intron of an endogenous gene, the engineered guide polynucleotide comprising a sequence having at least about 95% identity to any one of SEQ ID NOs: 159-184. In some embodiments, the engineered nuclease system comprises an endonuclease comprising a sequence having at least about 96% identity to any one of SEQ ID NOs: 1-27 and 771-862 and an engineered guide polynucleotide configured to form a complex with the endonuclease and comprising a spacer sequence configured to hybridize to at least a portion of a target nucleic acid sequence within a B2M gene or within an intron of an endogenous gene, the engineered guide polynucleotide comprising a sequence having at least about 96% identity to any one of SEQ ID NOs: 159-184. In some embodiments, the engineered nuclease system comprises an endonuclease comprising a sequence having at least about 97% identity to any one of SEQ ID NOs: 1-27 and 771-862 and an engineered guide polynucleotide configured to form a complex with the endonuclease and comprising a spacer sequence configured to hybridize to at least a portion of a target nucleic acid sequence within a B2M gene or within an intron of an endogenous gene, the engineered guide polynucleotide comprising a sequence having at least about 97% identity to any one of SEQ ID NOs: 159-184. In some embodiments, the engineered nuclease system comprises an endonuclease comprising a sequence having at least about 98% identity to any one of SEQ ID NOs: 1-27 and 771-862 and an engineered guide polynucleotide configured to form a complex with the endonuclease and comprising a spacer sequence configured to hybridize to at least a portion of a target nucleic acid sequence within a B2M gene or within an intron of an endogenous gene, the engineered guide polynucleotide comprising a sequence having at least about 98% identity to any one of SEQ ID NOs: 159-184. In some embodiments, the engineered nuclease system comprises an endonuclease comprising a sequence having at least about 99% identity to any one of SEQ ID NOs: 1-27 and 771-862 and an engineered guide polynucleotide configured to form a complex with the endonuclease and comprising a spacer sequence configured to hybridize to at least a portion of a target nucleic acid sequence within a B2M gene or within an intron of an endogenous gene, the engineered guide polynucleotide comprising a sequence having at least about 99% identity to any one of SEQ ID NOs: 159-184. In some embodiments, the engineered nuclease system comprises an endonuclease comprising 100% identity to any one of SEQ ID NOs: 1-27 and 771-862 and an engineered guide polynucleotide configured to form a complex with the endonuclease and comprising a spacer sequence configured to hybridize to at least a portion of a target nucleic acid sequence within a B2M gene or within an intron of an endogenous gene, the engineered guide polynucleotide comprising 100% identity to any one of SEQ ID NOs: 159-184. In some embodiments, the guide polynucleotide hybridizes or targets a sequence complementary to any one of SEQ ID NOs: 159-184 or a sequence having at least 90%, 95%, 97%, 98%, or 99% sequence identity to any one of SEQ ID NOs: 159-184.

[0320] In some embodiments, the guide polynucleotide hybridizes or targets a sequence according to any one of SEQ ID NOs: 185-210 or a sequence having at least 90%, 95%, 97%, 98%, or 99% sequence identity to any one of SEQ ID NOs: 185-210. In some embodiments, the target nucleic acid sequence comprises a sequence having at least 90% sequence identity to any one of SEQ ID NOs: 185-210.

[0321] In some embodiments, the engineered nuclease system comprises an endonuclease comprising a sequence having at least about 70% identity to any one of SEQ ID NOs: 1-27 and 771-862 and an engineered guide polynucleotide configured to form a complex with the endonuclease and comprising a spacer sequence configured to hybridize to at least a portion of a target nucleic acid sequence within a TRBC1 gene or within an intron of an endogenous gene, the engineered guide polynucleotide comprising a sequence having at least about 70% identity to any one of SEQ ID NOs: 211-251. In some embodiments, the engineered nuclease system comprises an endonuclease comprising a sequence having at least about 75% identity to any one of SEQ ID NOs: 1-27 and 771-862 and an engineered guide polynucleotide configured to form a complex with the endonuclease and comprising a spacer sequence configured to hybridize to at least a portion of a target nucleic acid sequence within a TRBC1 gene or within an intron of an endogenous gene, the engineered guide polynucleotide comprising a sequence having at least about 75% identity to any one of SEQ ID NOs: 211-251. In some embodiments, the engineered nuclease system comprises an endonuclease comprising a sequence having at least about 80% identity to any one of SEQ ID NOs: 1-27 and 771-862 and an engineered guide polynucleotide configured to form a complex with the endonuclease and comprising a spacer sequence configured to hybridize to at least a portion of a target nucleic acid sequence within a TRBC1 gene or within an intron of an endogenous gene, the engineered guide polynucleotide comprising a sequence having at least about 80% identity to any one of SEQ ID NOs: 211-251. In some embodiments, the engineered nuclease system comprises an endonuclease comprising a sequence having at least about 85% identity to any one of SEQ ID NOs: 1-27 and 771-862 and an engineered guide polynucleotide configured to form a complex with the endonuclease and comprising a spacer sequence configured to hybridize to at least a portion of a target nucleic acid sequence within a TRBC1 gene or within an intron of an endogenous gene, the engineered guide polynucleotide comprising a sequence having at least about 85% identity to any one of SEQ ID NOs: 211-251. In some embodiments, the engineered nuclease system comprises an endonuclease comprising a sequence having at least about 90% identity to any one of SEQ ID NOs: 1-27 and 771-862 and an engineered guide polynucleotide configured to form a complex with the endonuclease and comprising a spacer sequence configured to hybridize to at least a portion of a target nucleic acid sequence within a TRBC1 gene or within an intron of an endogenous gene, the engineered guide polynucleotide comprising a sequence having at least about 90% identity to any one of SEQ ID NOs: 211-251. In some embodiments, the engineered nuclease system comprises an endonuclease comprising a sequence having at least about 95% identity to any one of SEQ ID NOs: 1-27 and 771-862 and an engineered guide polynucleotide configured to form a complex with the endonuclease and comprising a spacer sequence configured to hybridize to at least a portion of a target nucleic acid sequence within a TRBC1 gene or within an intron of an endogenous gene, the engineered guide polynucleotide comprising a sequence having at least about 95% identity to any one of SEQ ID NOs: 211-251. In some embodiments, the engineered nuclease system comprises an endonuclease comprising a sequence having at least about 96% identity to any one of SEQ ID NOs: 1-27 and 771-862 and an engineered guide polynucleotide configured to form a complex with the endonuclease and comprising a spacer sequence configured to hybridize to at least a portion of a target nucleic acid sequence within a TRBC1 gene or within an intron of an endogenous gene, the engineered guide polynucleotide comprising a sequence having at least about 96% identity to any one of SEQ ID NOs: 211-251. In some embodiments, the engineered nuclease system comprises an endonuclease comprising a sequence having at least about 97% identity to any one of SEQ ID NOs: 1-27 and 771-862 and an engineered guide polynucleotide configured to form a complex with the endonuclease and comprising a spacer sequence configured to hybridize to at least a portion of a target nucleic acid sequence within a TRBC1 gene or within an intron of an endogenous gene, the engineered guide polynucleotide comprising a sequence having at least about 97% identity to any one of SEQ ID NOs: 211-251. In some embodiments, the engineered nuclease system comprises an endonuclease comprising a sequence having at least about 98% identity to any one of SEQ ID NOs: 1-27 and 771-862 and an engineered guide polynucleotide configured to form a complex with the endonuclease and comprising a spacer sequence configured to hybridize to at least a portion of a target nucleic acid sequence within a TRBC1 gene or within an intron of an endogenous gene, the engineered guide polynucleotide comprising a sequence having at least about 98% identity to any one of SEQ ID NOs: 211-251. In some embodiments, the engineered nuclease system comprises an endonuclease comprising a sequence having at least about 99% identity to any one of SEQ ID NOs: 1-27 and 771-862 and an engineered guide polynucleotide configured to form a complex with the endonuclease and comprising a spacer sequence configured to hybridize to at least a portion of a target nucleic acid sequence within a TRBC1 gene or within an intron of an endogenous gene, the engineered guide polynucleotide comprising a sequence having at least about 99% identity to any one of SEQ ID NOs: 211-251. In some embodiments, the engineered nuclease system comprises an endonuclease comprising 100% identity to any one of SEQ ID NOs: 1-27 and 771-862 and an engineered guide polynucleotide configured to form a complex with the endonuclease and comprising a spacer sequence configured to hybridize to at least a portion of a target nucleic acid sequence within a TRBC1 gene or within an intron of an endogenous gene, the engineered guide polynucleotide comprising 100% identity to any one of SEQ ID NOs: 211-251. In some embodiments, the guide polynucleotide hybridizes or targets a sequence complementary to any one of SEQ ID NOs: 211-251 or a sequence having at least 90%, 95%, 97%, 98%, or 99% sequence identity to any one of SEQ ID NOs: 211-251.

[0322] In some embodiments, the guide polynucleotide hybridizes or targets a sequence according to any one of SEQ ID NOs: 252-292 or a sequence having at least 90%, 95%, 97%, 98%, or 99% sequence identity to any one of SEQ ID NOs: 252-292. In some embodiments, the target nucleic acid sequence comprises a sequence having at least 90% sequence identity to any one of SEQ ID NOs: 252-292.

[0323] In some embodiments, the engineered nuclease system comprises an endonuclease comprising a sequence having at least about 70% identity to any one of SEQ ID NOs: 1-27 and 771-862 and an engineered guide polynucleotide configured to form a complex with the endonuclease and comprising a spacer sequence configured to hybridize to at least a portion of a target nucleic acid sequence within a TRBC2 gene or within an intron of an endogenous gene, the engineered guide polynucleotide comprising a sequence having at least about 70% identity to any one of SEQ ID NOs: 293-337. In some embodiments, the engineered nuclease system comprises an endonuclease comprising a sequence having at least about 75% identity to any one of SEQ ID NOs: 1-27 and 771-862 and an engineered guide polynucleotide configured to form a complex with the endonuclease and comprising a spacer sequence configured to hybridize to at least a portion of a target nucleic acid sequence within a TRBC2 gene or within an intron of an endogenous gene, the engineered guide polynucleotide comprising a sequence having at least about 75% identity to any one of SEQ ID NOs: 293-337. In some embodiments, the engineered nuclease system comprises an endonuclease comprising a sequence having at least about 80% identity to any one of SEQ ID NOs: 1-27 and 771-862 and an engineered guide polynucleotide configured to form a complex with the endonuclease and comprising a spacer sequence configured to hybridize to at least a portion of a target nucleic acid sequence within a TRBC2 gene or within an intron of an endogenous gene, the engineered guide polynucleotide comprising a sequence having at least about 80% identity to any one of SEQ ID NOs: 293-337. In some embodiments, the engineered nuclease system comprises an endonuclease comprising a sequence having at least about 85% identity to any one of SEQ ID NOs: 1-27 and 771-862 and an engineered guide polynucleotide configured to form a complex with the endonuclease and comprising a spacer sequence configured to hybridize to at least a portion of a target nucleic acid sequence within a TRBC2 gene or within an intron of an endogenous gene, the engineered guide polynucleotide comprising a sequence having at least about 85% identity to any one of SEQ ID NOs: 293-337. In some embodiments, the engineered nuclease system comprises an endonuclease comprising a sequence having at least about 90% identity to any one of SEQ ID NOs: 1-27 and 771-862 and an engineered guide polynucleotide configured to form a complex with the endonuclease and comprising a spacer sequence configured to hybridize to at least a portion of a target nucleic acid sequence within a TRBC2 gene or within an intron of an endogenous gene, the engineered guide polynucleotide comprising a sequence having at least about 90% identity to any one of SEQ ID NOs: 293-337. In some embodiments, the engineered nuclease system comprises an endonuclease comprising a sequence having at least about 95% identity to any one of SEQ ID NOs: 1-27 and 771-862 and an engineered guide polynucleotide configured to form a complex with the endonuclease and comprising a spacer sequence configured to hybridize to at least a portion of a target nucleic acid sequence within a TRBC2 gene or within an intron of an endogenous gene, the engineered guide polynucleotide comprising a sequence having at least about 95% identity to any one of SEQ ID NOs: 293-337. In some embodiments, the engineered nuclease system comprises an endonuclease comprising a sequence having at least about 96% identity to any one of SEQ ID NOs: 1-27 and 771-862 and an engineered guide polynucleotide configured to form a complex with the endonuclease and comprising a spacer sequence configured to hybridize to at least a portion of a target nucleic acid sequence within a TRBC2 gene or within an intron of an endogenous gene, the engineered guide polynucleotide comprising a sequence having at least about 96% identity to any one of SEQ ID NOs: 293-337. In some embodiments, the engineered nuclease system comprises an endonuclease comprising a sequence having at least about 97% identity to any one of SEQ ID NOs: 1-27 and 771-862 and an engineered guide polynucleotide configured to form a complex with the endonuclease and comprising a spacer sequence configured to hybridize to at least a portion of a target nucleic acid sequence within a TRBC2 gene or within an intron of an endogenous gene, the engineered guide polynucleotide comprising a sequence having at least about 97% identity to any one of SEQ ID NOs: 293-337. In some embodiments, the engineered nuclease system comprises an endonuclease comprising a sequence having at least about 98% identity to any one of SEQ ID NOs: 1-27 and 771-862 and an engineered guide polynucleotide configured to form a complex with the endonuclease and comprising a spacer sequence configured to hybridize to at least a portion of a target nucleic acid sequence within a TRBC2 gene or within an intron of an endogenous gene, the engineered guide polynucleotide comprising a sequence having at least about 98% identity to any one of SEQ ID NOs: 293-337. In some embodiments, the engineered nuclease system comprises an endonuclease comprising a sequence having at least about 99% identity to any one of SEQ ID NOs: 1-27 and 771-862 and an engineered guide polynucleotide configured to form a complex with the endonuclease and comprising a spacer sequence configured to hybridize to at least a portion of a target nucleic acid sequence within a TRBC2 gene or within an intron of an endogenous gene, the engineered guide polynucleotide comprising a sequence having at least about 99% identity to any one of SEQ ID NOs: 293-337. In some embodiments, the engineered nuclease system comprises an endonuclease comprising 100% identity to any one of SEQ ID NOs: 1-27 and 771-862 and an engineered guide polynucleotide configured to form a complex with the endonuclease and comprising a spacer sequence configured to hybridize to at least a portion of a target nucleic acid sequence within a TRBC2 gene or within an intron of an endogenous gene, the engineered guide polynucleotide comprising 100% identity to any one of SEQ ID NOs: 293-337. In some embodiments, the guide polynucleotide hybridizes or targets a sequence complementary to any one of SEQ ID NOs: 293-337 or a sequence having at least 90%, 95%, 97%, 98%, or 99% sequence identity to any one of SEQ ID NOs: 293-337.

[0324] In some embodiments, the guide polynucleotide hybridizes or targets a sequence according to any one of SEQ ID NOs: 338-382 or a sequence having at least 90%, 95%, 97%, 98%, or 99% sequence identity to any one of SEQ ID NOs: 338-382. In some embodiments, the target nucleic acid sequence comprises a sequence having at least 90% sequence identity to any one of SEQ ID NOs: 338-382.

[0325] In some embodiments, the engineered nuclease system comprises an endonuclease comprising a sequence having at least about 70% identity to any one of SEQ ID NOs: 1-27 and 771-862 and an engineered guide polynucleotide configured to form a complex with the endonuclease and comprising a spacer sequence configured to hybridize to at least a portion of a target nucleic acid sequence within an ANGPTL3 gene or within an intron of an endogenous gene, the engineered guide polynucleotide comprising a sequence having at least about 70% identity to any one of SEQ ID NOs: 383-477, 1392-1489, 2120-2215, and 2312-2350. In some embodiments, the engineered nuclease system comprises an endonuclease comprising a sequence having at least about 75% identity to any one of SEQ ID NOs: 1-27 and 771-862 and an engineered guide polynucleotide configured to form a complex with the endonuclease and comprising a spacer sequence configured to hybridize to at least a portion of a target nucleic acid sequence within an ANGPTL3 gene or within an intron of an endogenous gene, the engineered guide polynucleotide comprising a sequence having at least about 75% identity to any one of SEQ ID NOs: 383-477, 1392-1489, 2120-2215, and 2312-2350. In some embodiments, the engineered nuclease system comprises an endonuclease comprising a sequence having at least about 80% identity to any one of SEQ ID NOs: 1-27 and 771-862 and an engineered guide polynucleotide configured to form a complex with the endonuclease and comprising a spacer sequence configured to hybridize to at least a portion of a target nucleic acid sequence within an ANGPTL3 gene or within an intron of an endogenous gene, the engineered guide polynucleotide comprising a sequence having at least about 80% identity to any one of SEQ ID NOs: 383-477, 1392-1489, 2120-2215, and 2312-2350. In some embodiments, the engineered nuclease system comprises an endonuclease comprising a sequence having at least about 85% identity to any one of SEQ ID NOs: 1-27 and 771-862 and an engineered guide polynucleotide configured to form a complex with the endonuclease and comprising a spacer sequence configured to hybridize to at least a portion of a target nucleic acid sequence within an ANGPTL3 gene or within an intron of an endogenous gene, the engineered guide polynucleotide comprising a sequence having at least about 85% identity to any one of SEQ ID NOs: 383-477, 1392-1489, 2120-2215, and 2312-2350. In some embodiments, the engineered nuclease system comprises an endonuclease comprising a sequence having at least about 90% identity to any one of SEQ ID NOs: 1-27 and 771-862 and an engineered guide polynucleotide configured to form a complex with the endonuclease and comprising a spacer sequence configured to hybridize to at least a portion of a target nucleic acid sequence within an ANGPTL3 gene or within an intron of an endogenous gene, the engineered guide polynucleotide comprising a sequence having at least about 90% identity to any one of SEQ ID NOs: 383-477, 1392-1489, 2120-2215, and 2312-2350. In some embodiments, the engineered nuclease system comprises an endonuclease comprising a sequence having at least about 95% identity to any one of SEQ ID NOs: 1-27 and 771-862 and an engineered guide polynucleotide configured to form a complex with the endonuclease and comprising a spacer sequence configured to hybridize to at least a portion of a target nucleic acid sequence within an ANGPTL3 gene or within an intron of an endogenous gene, the engineered guide polynucleotide comprising a sequence having at least about 95% identity to any one of SEQ ID NOs: 383-477, 1392-1489, 2120-2215, and 2312-2350. In some embodiments, the engineered nuclease system comprises an endonuclease comprising a sequence having at least about 96% identity to any one of SEQ ID NOs: 1-27 and 771-862 and an engineered guide polynucleotide configured to form a complex with the endonuclease and comprising a spacer sequence configured to hybridize to at least a portion of a target nucleic acid sequence within an ANGPTL3 gene or within an intron of an endogenous gene, the engineered guide polynucleotide comprising a sequence having at least about 96% identity to any one of SEQ ID NOs: 383-477, 1392-1489, 2120-2215, and 2312-2350. In some embodiments, the engineered nuclease system comprises an endonuclease comprising a sequence having at least about 97% identity to any one of SEQ ID NOs: 1-27 and 771-862 and an engineered guide polynucleotide configured to form a complex with the endonuclease and comprising a spacer sequence configured to hybridize to at least a portion of a target nucleic acid sequence within an ANGPTL3 gene or within an intron of an endogenous gene, the engineered guide polynucleotide comprising a sequence having at least about 97% identity to any one of SEQ ID NOs: 383-477, 1392-1489, 2120-2215, and 2312-2350. In some embodiments, the engineered nuclease system comprises an endonuclease comprising a sequence having at least about 98% identity to any one of SEQ ID NOs: 1-27 and 771-862 and an engineered guide polynucleotide configured to form a complex with the endonuclease and comprising a spacer sequence configured to hybridize to at least a portion of a target nucleic acid sequence within an ANGPTL3 gene or within an intron of an endogenous gene, the engineered guide polynucleotide comprising a sequence having at least about 98% identity to any one of SEQ ID NOs: 383-477, 1392-1489, 2120-2215, and 2312-2350. In some embodiments, the engineered nuclease system comprises an endonuclease comprising a sequence having at least about 99% identity to any one of SEQ ID NOs: 1-27 and 771-862 and an engineered guide polynucleotide configured to form a complex with the endonuclease and comprising a spacer sequence configured to hybridize to at least a portion of a target nucleic acid sequence within an ANGPTL3 gene or within an intron of an endogenous gene, the engineered guide polynucleotide comprising a sequence having at least about 99% identity to any one of SEQ ID NOs: 383-477, 1392-1489, 2120-2215, and 2312-2350. In some embodiments, the engineered nuclease system comprises an endonuclease comprising 100% identity to any one of SEQ ID NOs: 1-27 and 771-862 and an engineered guide polynucleotide configured to form a complex with the endonuclease and comprising a spacer sequence configured to hybridize to at least a portion of a target nucleic acid sequence within an ANGPTL3 gene or within an intron of an endogenous gene, the engineered guide polynucleotide comprising 100% identity to any one of SEQ ID NOs: 383-477, 1392-1489, 2120-2215, and 2312-2350. In some embodiments, the guide polynucleotide hybridizes or targets a sequence complementary to any one of SEQ ID NOs: 383-477, 1392-1489, 2120-2215, and 2312-2350 or a sequence having at least 90%, 95%, 97%, 98%, or 99% sequence identity to any one of SEQ ID NOs: 383-477, 1392-1489, 2120-2215, and 2312-2350.

[0326] In some embodiments, the guide polynucleotide hybridizes or targets a sequence according to any one of SEQ ID NOs: 478-572, 1490-1587, 2216-2311, and 2351-2389 or a sequence having at least 90%, 95%, 97%, 98%, or 99% sequence identity to any one of SEQ ID NOs: 478-572, 1490-1587, 2216-2311, and 2351-2389. In some embodiments, the target nucleic acid sequence comprises a sequence having at least 90% sequence identity to any one of SEQ ID NOs: 478-572, 1490-1587, 2216-2311, and 2351-2389.

[0327] In some embodiments, the engineered nuclease system comprises an endonuclease comprising a sequence having at least about 70% identity to any one of SEQ ID NOs: 1-27 and 771-862 and an engineered guide polynucleotide configured to form a complex with the endonuclease and comprising a spacer sequence configured to hybridize to at least a portion of a target nucleic acid sequence within a PCSK9 gene or within an intron of an endogenous gene, the engineered guide polynucleotide comprising a sequence having at least about 70% identity to any one of SEQ ID NOs: 573-587 and 1362-1376. In some embodiments, the engineered nuclease system comprises an endonuclease comprising a sequence having at least about 75% identity to any one of SEQ ID NOs: 1-27 and 771-862 and an engineered guide polynucleotide configured to form a complex with the endonuclease and comprising a spacer sequence configured to hybridize to at least a portion of a target nucleic acid sequence within a PCSK9 gene or within an intron of an endogenous gene, the engineered guide polynucleotide comprising a sequence having at least about 75% identity to any one of SEQ ID NOs: 573-587 and 1362-1376. In some embodiments, the engineered nuclease system comprises an endonuclease comprising a sequence having at least about 80% identity to any one of SEQ ID NOs: 1-27 and 771-862 and an engineered guide polynucleotide configured to form a complex with the endonuclease and comprising a spacer sequence configured to hybridize to at least a portion of a target nucleic acid sequence within a PCSK9 gene or within an intron of an endogenous gene, the engineered guide polynucleotide comprising a sequence having at least about 80% identity to any one of SEQ ID NOs: 573-587 and 1362-1376. In some embodiments, the engineered nuclease system comprises an endonuclease comprising a sequence having at least about 85% identity to any one of SEQ ID NOs: 1-27 and 771-862 and an engineered guide polynucleotide configured to form a complex with the endonuclease and comprising a spacer sequence configured to hybridize to at least a portion of a target nucleic acid sequence within a PCSK9 gene or within an intron of an endogenous gene, the engineered guide polynucleotide comprising a sequence having at least about 85% identity to any one of SEQ ID NOs: 573-587 and 1362-1376. In some embodiments, the engineered nuclease system comprises an endonuclease comprising a sequence having at least about 90% identity to any one of SEQ ID NOs: 1-27 and 771-862 and an engineered guide polynucleotide configured to form a complex with the endonuclease and comprising a spacer sequence configured to hybridize to at least a portion of a target nucleic acid sequence within a PCSK9 gene or within an intron of an endogenous gene, the engineered guide polynucleotide comprising a sequence having at least about 90% identity to any one of SEQ ID NOs: 573-587 and 1362-1376. In some embodiments, the engineered nuclease system comprises an endonuclease comprising a sequence having at least about 95% identity to any one of SEQ ID NOs: 1-27 and 771-862 and an engineered guide polynucleotide configured to form a complex with the endonuclease and comprising a spacer sequence configured to hybridize to at least a portion of a target nucleic acid sequence within a PCSK9 gene or within an intron of an endogenous gene, the engineered guide polynucleotide comprising a sequence having at least about 95% identity to any one of SEQ ID NOs: 573-587 and 1362-1376. In some embodiments, the engineered nuclease system comprises an endonuclease comprising a sequence having at least about 96% identity to any one of SEQ ID NOs: 1-27 and 771-862 and an engineered guide polynucleotide configured to form a complex with the endonuclease and comprising a spacer sequence configured to hybridize to at least a portion of a target nucleic acid sequence within a PCSK9 gene or within an intron of an endogenous gene, the engineered guide polynucleotide comprising a sequence having at least about 96% identity to any one of SEQ ID NOs: 573-587 and 1362-1376. In some embodiments, the engineered nuclease system comprises an endonuclease comprising a sequence having at least about 97% identity to any one of SEQ ID NOs: 1-27 and 771-862 and an engineered guide polynucleotide configured to form a complex with the endonuclease and comprising a spacer sequence configured to hybridize to at least a portion of a target nucleic acid sequence within a PCSK9 gene or within an intron of an endogenous gene, the engineered guide polynucleotide comprising a sequence having at least about 97% identity to any one of SEQ ID NOs: 573-587 and 1362-1376. In some embodiments, the engineered nuclease system comprises an endonuclease comprising a sequence having at least about 98% identity to any one of SEQ ID NOs: 1-27 and 771-862 and an engineered guide polynucleotide configured to form a complex with the endonuclease and comprising a spacer sequence configured to hybridize to at least a portion of a target nucleic acid sequence within a PCSK9 gene or within an intron of an endogenous gene, the engineered guide polynucleotide comprising a sequence having at least about 98% identity to any one of SEQ ID NOs: 573-587 and 1362-1376. In some embodiments, the engineered nuclease system comprises an endonuclease comprising a sequence having at least about 99% identity to any one of SEQ ID NOs: 1-27 and 771-862 and an engineered guide polynucleotide configured to form a complex with the endonuclease and comprising a spacer sequence configured to hybridize to at least a portion of a target nucleic acid sequence within a PCSK9 gene or within an intron of an endogenous gene, the engineered guide polynucleotide comprising a sequence having at least about 99% identity to any one of SEQ ID NOs: 573-587 and 1362-1376. In some embodiments, the engineered nuclease system comprises an endonuclease comprising 100% identity to any one of SEQ ID NOs: 1-27 and 771-862 and an engineered guide polynucleotide configured to form a complex with the endonuclease and comprising a spacer sequence configured to hybridize to at least a portion of a target nucleic acid sequence within a PCSK9 gene or within an intron of an endogenous gene, the engineered guide polynucleotide comprising 100% identity to any one of SEQ ID NOs: 573-587 and 1362-1376. In some embodiments, the guide polynucleotide hybridizes or targets a sequence complementary to any one of SEQ ID NOs: 573-587 and 1362-1376 or a sequence having at least 90%, 95%, 97%, 98%, or 99% sequence identity to any one of SEQ ID NOs: 573-587 and 1362-1376.

[0328] In some embodiments, the guide polynucleotide hybridizes or targets a sequence according to any one of SEQ ID NOs: 588-602 and 1377-1391 or a sequence having at least 90%, 95%, 97%, 98%, or 99% sequence identity to any one of SEQ ID NOs: 588-602 and 1377-1391. In some embodiments, the target nucleic acid sequence comprises a sequence having at least 90% sequence identity to any one of SEQ ID NOs: 588-602 and 1377-1391.

[0329] In some embodiments, the engineered nuclease system comprises an endonuclease comprising a sequence having at least about 70% identity to any one of SEQ ID NOs: 1-27 and 771-862 and an engineered guide polynucleotide configured to form a complex with the endonuclease and comprising a spacer sequence configured to hybridize to at least a portion of a target nucleic acid sequence within a VCP gene or within an intron of an endogenous gene, the engineered guide polynucleotide comprising a sequence having at least about 70% identity to any one of SEQ ID NOs: 723-738 and 755-762. In some embodiments, the engineered nuclease system comprises an endonuclease comprising a sequence having at least about 75% identity to any one of SEQ ID NOs: 1-27 and 771-862 and an engineered guide polynucleotide configured to form a complex with the endonuclease and comprising a spacer sequence configured to hybridize to at least a portion of a target nucleic acid sequence within a VCP gene or within an intron of an endogenous gene, the engineered guide polynucleotide comprising a sequence having at least about 75% identity to any one of SEQ ID NOs: 723-738 and 755-762. In some embodiments, the engineered nuclease system comprises an endonuclease comprising a sequence having at least about 80% identity to any one of SEQ ID NOs: 1-27 and 771-862 and an engineered guide polynucleotide configured to form a complex with the endonuclease and comprising a spacer sequence configured to hybridize to at least a portion of a target nucleic acid sequence within a VCP gene or within an intron of an endogenous gene, the engineered guide polynucleotide comprising a sequence having at least about 80% identity to any one of SEQ ID NOs: 723-738 and 755-762. In some embodiments, the engineered nuclease system comprises an endonuclease comprising a sequence having at least about 85% identity to any one of SEQ ID NOs: 1-27 and 771-862 and an engineered guide polynucleotide configured to form a complex with the endonuclease and comprising a spacer sequence configured to hybridize to at least a portion of a target nucleic acid sequence within a VCP gene or within an intron of an endogenous gene, the engineered guide polynucleotide comprising a sequence having at least about 85% identity to any one of SEQ ID NOs: 723-738 and 755-762. In some embodiments, the engineered nuclease system comprises an endonuclease comprising a sequence having at least about 90% identity to any one of SEQ ID NOs: 1-27 and 771-862 and an engineered guide polynucleotide configured to form a complex with the endonuclease and comprising a spacer sequence configured to hybridize to at least a portion of a target nucleic acid sequence within a VCP gene or within an intron of an endogenous gene, the engineered guide polynucleotide comprising a sequence having at least about 90% identity to any one of SEQ ID NOs: 723-738 and 755-762. In some embodiments, the engineered nuclease system comprises an endonuclease comprising a sequence having at least about 95% identity to any one of SEQ ID NOs: 1-27 and 771-862 and an engineered guide polynucleotide configured to form a complex with the endonuclease and comprising a spacer sequence configured to hybridize to at least a portion of a target nucleic acid sequence within a VCP gene or within an intron of an endogenous gene, the engineered guide polynucleotide comprising a sequence having at least about 95% identity to any one of SEQ ID NOs: 723-738 and 755-762. In some embodiments, the engineered nuclease system comprises an endonuclease comprising a sequence having at least about 96% identity to any one of SEQ ID NOs: 1-27 and 771-862 and an engineered guide polynucleotide configured to form a complex with the endonuclease and comprising a spacer sequence configured to hybridize to at least a portion of a target nucleic acid sequence within a VCP gene or within an intron of an endogenous gene, the engineered guide polynucleotide comprising a sequence having at least about 96% identity to any one of SEQ ID NOs: 723-738 and 755-762. In some embodiments, the engineered nuclease system comprises an endonuclease comprising a sequence having at least about 97% identity to any one of SEQ ID NOs: 1-27 and 771-862 and an engineered guide polynucleotide configured to form a complex with the endonuclease and comprising a spacer sequence configured to hybridize to at least a portion of a target nucleic acid sequence within a VCP gene or within an intron of an endogenous gene, the engineered guide polynucleotide comprising a sequence having at least about 97% identity to any one of SEQ ID NOs: 723-738 and 755-762. In some embodiments, the engineered nuclease system comprises an endonuclease comprising a sequence having at least about 98% identity to any one of SEQ ID NOs: 1-27 and 771-862 and an engineered guide polynucleotide configured to form a complex with the endonuclease and comprising a spacer sequence configured to hybridize to at least a portion of a target nucleic acid sequence within a VCP gene or within an intron of an endogenous gene, the engineered guide polynucleotide comprising a sequence having at least about 98% identity to any one of SEQ ID NOs: 723-738 and 755-762. In some embodiments, the engineered nuclease system comprises an endonuclease comprising a sequence having at least about 99% identity to any one of SEQ ID NOs: 1-27 and 771-862 and an engineered guide polynucleotide configured to form a complex with the endonuclease and comprising a spacer sequence configured to hybridize to at least a portion of a target nucleic acid sequence within a VCP gene or within an intron of an endogenous gene, the engineered guide polynucleotide comprising a sequence having at least about 99% identity to any one of SEQ ID NOs: 723-738 and 755-762. In some embodiments, the engineered nuclease system comprises an endonuclease comprising 100% identity to any one of SEQ ID NOs: 1-27 and 771-862 and an engineered guide polynucleotide configured to form a complex with the endonuclease and comprising a spacer sequence configured to hybridize to at least a portion of a target nucleic acid sequence within a VCP gene or within an intron of an endogenous gene, the engineered guide polynucleotide comprising 100% identity to any one of SEQ ID NOs: 723-738 and 755-762. In some embodiments, the guide polynucleotide hybridizes or targets a sequence complementary to any one of SEQ ID NOs: 723-738 and 755-762 or a sequence having at least 90%, 95%, 97%, 98%, or 99% sequence identity to any one of SEQ ID NOs: 723-738 and 755-762.

[0330] In some embodiments, the guide polynucleotide hybridizes or targets a sequence according to any one of SEQ ID NOs: 739-754 and 763-770 or a sequence having at least 90%, 95%, 97%, 98%, or 99% sequence identity to any one of SEQ ID NOs: 739-754 and 763-770. In some embodiments, the target nucleic acid sequence comprises a sequence having at least 90% sequence identity to any one of SEQ ID NOs: 739-754 and 763-770.

[0331] In some embodiments, the engineered nuclease system comprises an endonuclease comprising a sequence having at least about 70% identity to any one of SEQ ID NOs: 1-27 and 771-862 and an engineered guide polynucleotide configured to form a complex with the endonuclease and comprising a spacer sequence configured to hybridize to at least a portion of a target nucleic acid sequence within an AAVS1 locus or within an intron of an endogenous gene, the engineered guide polynucleotide comprising a sequence having at least about 70% identity to any one of SEQ ID NOs: 928-949 and 1012-1049. In some embodiments, the engineered nuclease system comprises an endonuclease comprising a sequence having at least about 75% identity to any one of SEQ ID NOs: 1-27 and 771-862 and an engineered guide polynucleotide configured to form a complex with the endonuclease and comprising a spacer sequence configured to hybridize to at least a portion of a target nucleic acid sequence within an AAVS1 locus or within an intron of an endogenous gene, the engineered guide polynucleotide comprising a sequence having at least about 75% identity to any one of SEQ ID NOs: 928-949 and 1012-1049. In some embodiments, the engineered nuclease system comprises an endonuclease comprising a sequence having at least about 80% identity to any one of SEQ ID NOs: 1-27 and 771-862 and an engineered guide polynucleotide configured to form a complex with the endonuclease and comprising a spacer sequence configured to hybridize to at least a portion of a target nucleic acid sequence within an AAVS1 locus or within an intron of an endogenous gene, the engineered guide polynucleotide comprising a sequence having at least about 80% identity to any one of SEQ ID NOs: 928-949 and 1012-1049. In some embodiments, the engineered nuclease system comprises an endonuclease comprising a sequence having at least about 85% identity to any one of SEQ ID NOs: 1-27 and 771-862 and an engineered guide polynucleotide configured to form a complex with the endonuclease and comprising a spacer sequence configured to hybridize to at least a portion of a target nucleic acid sequence within an AAVS1 locus or within an intron of an endogenous gene, the engineered guide polynucleotide comprising a sequence having at least about 85% identity to any one of SEQ ID NOs: 928-949 and 1012-1049. In some embodiments, the engineered nuclease system comprises an endonuclease comprising a sequence having at least about 90% identity to any one of SEQ ID NOs: 1-27 and 771-862 and an engineered guide polynucleotide configured to form a complex with the endonuclease and comprising a spacer sequence configured to hybridize to at least a portion of a target nucleic acid sequence within an AAVS1 locus or within an intron of an endogenous gene, the engineered guide polynucleotide comprising a sequence having at least about 90% identity to any one of SEQ ID NOs: 928-949 and 1012-1049. In some embodiments, the engineered nuclease system comprises an endonuclease comprising a sequence having at least about 95% identity to any one of SEQ ID NOs: 1-27 and 771-862 and an engineered guide polynucleotide configured to form a complex with the endonuclease and comprising a spacer sequence configured to hybridize to at least a portion of a target nucleic acid sequence within an AAVS1 locus or within an intron of an endogenous gene, the engineered guide polynucleotide comprising a sequence having at least about 95% identity to any one of SEQ ID NOs: 928-949 and 1012-1049. In some embodiments, the engineered nuclease system comprises an endonuclease comprising a sequence having at least about 96% identity to any one of SEQ ID NOs: 1-27 and 771-862 and an engineered guide polynucleotide configured to form a complex with the endonuclease and comprising a spacer sequence configured to hybridize to at least a portion of a target nucleic acid sequence within an AAVS1 locus or within an intron of an endogenous gene, the engineered guide polynucleotide comprising a sequence having at least about 96% identity to any one of SEQ ID NOs: 928-949 and 1012-1049. In some embodiments, the engineered nuclease system comprises an endonuclease comprising a sequence having at least about 97% identity to any one of SEQ ID NOs: 1-27 and 771-862 and an engineered guide polynucleotide configured to form a complex with the endonuclease and comprising a spacer sequence configured to hybridize to at least a portion of a target nucleic acid sequence within an AAVS1 locus or within an intron of an endogenous gene, the engineered guide polynucleotide comprising a sequence having at least about 97% identity to any one of SEQ ID NOs: 928-949 and 1012-1049. In some embodiments, the engineered nuclease system comprises an endonuclease comprising a sequence having at least about 98% identity to any one of SEQ ID NOs: 1-27 and 771-862 and an engineered guide polynucleotide configured to form a complex with the endonuclease and comprising a spacer sequence configured to hybridize to at least a portion of a target nucleic acid sequence within an AAVS1 locus or within an intron of an endogenous gene, the engineered guide polynucleotide comprising a sequence having at least about 98% identity to any one of SEQ ID NOs: 928-949 and 1012-1049. In some embodiments, the engineered nuclease system comprises an endonuclease comprising a sequence having at least about 99% identity to any one of SEQ ID NOs: 1-27 and 771-862 and an engineered guide polynucleotide configured to form a complex with the endonuclease and comprising a spacer sequence configured to hybridize to at least a portion of a target nucleic acid sequence within an AAVS1 locus or within an intron of an endogenous gene, the engineered guide polynucleotide comprising a sequence having at least about 99% identity to any one of SEQ ID NOs: 928-949 and 1012-1049. In some embodiments, the engineered nuclease system comprises an endonuclease comprising 100% identity to any one of SEQ ID NOs: 1-27 and 771-862 and an engineered guide polynucleotide configured to form a complex with the endonuclease and comprising a spacer sequence configured to hybridize to at least a portion of a target nucleic acid sequence within an AAVS1 locus or within an intron of an endogenous gene, the engineered guide polynucleotide comprising 100% identity to any one of SEQ ID NOs: 928-949 and 1012-1049. In some embodiments, the guide polynucleotide hybridizes or targets a sequence complementary to any one of SEQ ID NOs: 928-949 and 1012-1049 or a sequence having at least 90%, 95%, 97%, 98%, or 99% sequence identity to any one of SEQ ID NOs: 928-949 and 1012-1049.

[0332] In some embodiments, the guide polynucleotide hybridizes or targets a sequence according to any one of SEQ ID NOs: 950-971 and 1050-1087 or a sequence having at least 90%, 95%, 97%, 98%, or 99% sequence identity to any one of SEQ ID NOs: 950-971 and 1050-1087. In some embodiments, the target nucleic acid sequence comprises a sequence having at least 90% sequence identity to any one of SEQ ID NOs: 950-971 and 1050-1087.

[0333] In some embodiments, the engineered nuclease system comprises an endonuclease comprising a sequence having at least about 70% identity to any one of SEQ ID NOs: 1-27 and 771-862 and an engineered guide polynucleotide configured to form a complex with the endonuclease and comprising a spacer sequence configured to hybridize to at least a portion of a target nucleic acid sequence within a GPR146 gene or within an intron of an endogenous gene, the engineered guide polynucleotide comprising a sequence having at least about 70% identity to any one of SEQ ID NOs: 1588-1656. In some embodiments, the engineered nuclease system comprises an endonuclease comprising a sequence having at least about 75% identity to any one of SEQ ID NOs: 1-27 and 771-862 and an engineered guide polynucleotide configured to form a complex with the endonuclease and comprising a spacer sequence configured to hybridize to at least a portion of a target nucleic acid sequence within a GPR146 gene or within an intron of an endogenous gene, the engineered guide polynucleotide comprising a sequence having at least about 75% identity to any one of SEQ ID NOs: 1588-1656. In some embodiments, the engineered nuclease system comprises an endonuclease comprising a sequence having at least about 80% identity to any one of SEQ ID NOs: 1-27 and 771-862 and an engineered guide polynucleotide configured to form a complex with the endonuclease and comprising a spacer sequence configured to hybridize to at least a portion of a target nucleic acid sequence within a GPR146 gene or within an intron of an endogenous gene, the engineered guide polynucleotide comprising a sequence having at least about 80% identity to any one of SEQ ID NOs: 1588-1656. In some embodiments, the engineered nuclease system comprises an endonuclease comprising a sequence having at least about 85% identity to any one of SEQ ID NOs: 1-27 and 771-862 and an engineered guide polynucleotide configured to form a complex with the endonuclease and comprising a spacer sequence configured to hybridize to at least a portion of a target nucleic acid sequence within a GPR146 gene or within an intron of an endogenous gene, the engineered guide polynucleotide comprising a sequence having at least about 85% identity to any one of SEQ ID NOs: 1588-1656. In some embodiments, the engineered nuclease system comprises an endonuclease comprising a sequence having at least about 90% identity to any one of SEQ ID NOs: 1-27 and 771-862 and an engineered guide polynucleotide configured to form a complex with the endonuclease and comprising a spacer sequence configured to hybridize to at least a portion of a target nucleic acid sequence within a GPR146 gene or within an intron of an endogenous gene, the engineered guide polynucleotide comprising a sequence having at least about 90% identity to any one of SEQ ID NOs: 1588-1656. In some embodiments, the engineered nuclease system comprises an endonuclease comprising a sequence having at least about 95% identity to any one of SEQ ID NOs: 1-27 and 771-862 and an engineered guide polynucleotide configured to form a complex with the endonuclease and comprising a spacer sequence configured to hybridize to at least a portion of a target nucleic acid sequence within a GPR146 gene or within an intron of an endogenous gene, the engineered guide polynucleotide comprising a sequence having at least about 95% identity to any one of SEQ ID NOs: 1588-1656. In some embodiments, the engineered nuclease system comprises an endonuclease comprising a sequence having at least about 96% identity to any one of SEQ ID NOs: 1-27 and 771-862 and an engineered guide polynucleotide configured to form a complex with the endonuclease and comprising a spacer sequence configured to hybridize to at least a portion of a target nucleic acid sequence within a GPR146 gene or within an intron of an endogenous gene, the engineered guide polynucleotide comprising a sequence having at least about 96% identity to any one of SEQ ID NOs: 1588-1656. In some embodiments, the engineered nuclease system comprises an endonuclease comprising a sequence having at least about 97% identity to any one of SEQ ID NOs: 1-27 and 771-862 and an engineered guide polynucleotide configured to form a complex with the endonuclease and comprising a spacer sequence configured to hybridize to at least a portion of a target nucleic acid sequence within a GPR146 gene or within an intron of an endogenous gene, the engineered guide polynucleotide comprising a sequence having at least about 97% identity to any one of SEQ ID NOs: 1588-1656. In some embodiments, the engineered nuclease system comprises an endonuclease comprising a sequence having at least about 98% identity to any one of SEQ ID NOs: 1-27 and 771-862 and an engineered guide polynucleotide configured to form a complex with the endonuclease and comprising a spacer sequence configured to hybridize to at least a portion of a target nucleic acid sequence within a GPR146 gene or within an intron of an endogenous gene, the engineered guide polynucleotide comprising a sequence having at least about 98% identity to any one of SEQ ID NOs: 1588-1656. In some embodiments, the engineered nuclease system comprises an endonuclease comprising a sequence having at least about 99% identity to any one of SEQ ID NOs: 1-27 and 771-862 and an engineered guide polynucleotide configured to form a complex with the endonuclease and comprising a spacer sequence configured to hybridize to at least a portion of a target nucleic acid sequence within a GPR146 gene or within an intron of an endogenous gene, the engineered guide polynucleotide comprising a sequence having at least about 99% identity to any one of SEQ ID NOs: 1588-1656. In some embodiments, the engineered nuclease system comprises an endonuclease comprising 100% identity to any one of SEQ ID NOs: 1-27 and 771-862 and an engineered guide polynucleotide configured to form a complex with the endonuclease and comprising a spacer sequence configured to hybridize to at least a portion of a target nucleic acid sequence within a GPR146 gene or within an intron of an endogenous gene, the engineered guide polynucleotide comprising 100% identity to any one of SEQ ID NOs: 1588-1656. In some embodiments, the guide polynucleotide hybridizes or targets a sequence complementary to any one of SEQ ID NOs: 1588-1656 or a sequence having at least 90%, 95%, 97%, 98%, or 99% sequence identity to any one of SEQ ID NOs: 1588-1656.

[0334] In some embodiments, the guide polynucleotide hybridizes or targets a sequence according to any one of SEQ ID NOs: 1657-1725 or a sequence having at least 90%, 95%, 97%, 98%, or 99% sequence identity to any one of SEQ ID NOs: 1657-1725. In some embodiments, the target nucleic acid sequence comprises a sequence having at least 90% sequence identity to any one of SEQ ID NOs: 1657-1725.

[0335] In some embodiments, the engineered nuclease system comprises an endonuclease comprising a sequence having at least about 70% identity to any one of SEQ ID NOs: 1-27 and 771-862 and an engineered guide polynucleotide configured to form a complex with the endonuclease and comprising a spacer sequence configured to hybridize to at least a portion of a target nucleic acid sequence within an APOA1 gene or within an intron of an endogenous gene, the engineered guide polynucleotide comprising a sequence having at least about 70% identity to any one of SEQ ID NOs: 1726-1744, 1764-1774, 1866-1961 and 2058-2088. In some embodiments, the engineered nuclease system comprises an endonuclease comprising a sequence having at least about 75% identity to any one of SEQ ID NOs: 1-27 and 771-862 and an engineered guide polynucleotide configured to form a complex with the endonuclease and comprising a spacer sequence configured to hybridize to at least a portion of a target nucleic acid sequence within an APOA1 gene or within an intron of an endogenous gene, the engineered guide polynucleotide comprising a sequence having at least about 75% identity to any one of SEQ ID NOs: 1726-1744, 1764-1774, 1866-1961 and 2058-2088. In some embodiments, the engineered nuclease system comprises an endonuclease comprising a sequence having at least about 80% identity to any one of SEQ ID NOs: 1-27 and 771-862 and an engineered guide polynucleotide configured to form a complex with the endonuclease and comprising a spacer sequence configured to hybridize to at least a portion of a target nucleic acid sequence within an APOA1 gene or within an intron of an endogenous gene, the engineered guide polynucleotide comprising a sequence having at least about 80% identity to any one of SEQ ID NOs: 1726-1744, 1764-1774, 1866-1961 and 2058-2088. In some embodiments, the engineered nuclease system comprises an endonuclease comprising a sequence having at least about 85% identity to any one of SEQ ID NOs: 1-27 and 771-862 and an engineered guide polynucleotide configured to form a complex with the endonuclease and comprising a spacer sequence configured to hybridize to at least a portion of a target nucleic acid sequence within an APOA1 gene or within an intron of an endogenous gene, the engineered guide polynucleotide comprising a sequence having at least about 85% identity to any one of SEQ ID NOs: 1726-1744, 1764-1774, 1866-1961 and 2058-2088. In some embodiments, the engineered nuclease system comprises an endonuclease comprising a sequence having at least about 90% identity to any one of SEQ ID NOs: 1-27 and 771-862 and an engineered guide polynucleotide configured to form a complex with the endonuclease and comprising a spacer sequence configured to hybridize to at least a portion of a target nucleic acid sequence within an APOA1 gene or within an intron of an endogenous gene, the engineered guide polynucleotide comprising a sequence having at least about 90% identity to any one of SEQ ID NOs: 1726-1744, 1764-1774, 1866-1961 and 2058-2088. In some embodiments, the engineered nuclease system comprises an endonuclease comprising a sequence having at least about 95% identity to any one of SEQ ID NOs: 1-27 and 771-862 and an engineered guide polynucleotide configured to form a complex with the endonuclease and comprising a spacer sequence configured to hybridize to at least a portion of a target nucleic acid sequence within an APOA1 gene or within an intron of an endogenous gene, the engineered guide polynucleotide comprising a sequence having at least about 95% identity to any one of SEQ ID NOs: 1726-1744, 1764-1774, 1866-1961 and 2058-2088. In some embodiments, the engineered nuclease system comprises an endonuclease comprising a sequence having at least about 96% identity to any one of SEQ ID NOs: 1-27 and 771-862 and an engineered guide polynucleotide configured to form a complex with the endonuclease and comprising a spacer sequence configured to hybridize to at least a portion of a target nucleic acid sequence within an APOA1 gene or within an intron of an endogenous gene, the engineered guide polynucleotide comprising a sequence having at least about 96% identity to any one of SEQ ID NOs: 1726-1744, 1764-1774, 1866-1961 and 2058-2088. In some embodiments, the engineered nuclease system comprises an endonuclease comprising a sequence having at least about 97% identity to any one of SEQ ID NOs: 1-27 and 771-862 and an engineered guide polynucleotide configured to form a complex with the endonuclease and comprising a spacer sequence configured to hybridize to at least a portion of a target nucleic acid sequence within an APOA1 gene or within an intron of an endogenous gene, the engineered guide polynucleotide comprising a sequence having at least about 97% identity to any one of SEQ ID NOs: 1726-1744, 1764-1774, 1866-1961 and 2058-2088. In some embodiments, the engineered nuclease system comprises an endonuclease comprising a sequence having at least about 98% identity to any one of SEQ ID NOs: 1-27 and 771-862 and an engineered guide polynucleotide configured to form a complex with the endonuclease and comprising a spacer sequence configured to hybridize to at least a portion of a target nucleic acid sequence within an APOA1 gene or within an intron of an endogenous gene, the engineered guide polynucleotide comprising a sequence having at least about 98% identity to any one of SEQ ID NOs: 1726-1744, 1764-1774, 1866-1961 and 2058-2088. In some embodiments, the engineered nuclease system comprises an endonuclease comprising a sequence having at least about 99% identity to any one of SEQ ID NOs: 1-27 and 771-862 and an engineered guide polynucleotide configured to form a complex with the endonuclease and comprising a spacer sequence configured to hybridize to at least a portion of a target nucleic acid sequence within an APOA1 gene or within an intron of an endogenous gene, the engineered guide polynucleotide comprising a sequence having at least about 99% identity to any one of SEQ ID NOs: 1726-1744, 1764-1774, 1866-1961 and 2058-2088. In some embodiments, the engineered nuclease system comprises an endonuclease comprising 100% identity to any one of SEQ ID NOs: 1-27 and 771-862 and an engineered guide polynucleotide configured to form a complex with the endonuclease and comprising a spacer sequence configured to hybridize to at least a portion of a target nucleic acid sequence within an APOA1 gene or within an intron of an endogenous gene, the engineered guide polynucleotide comprising 100% identity to any one of SEQ ID NOs: 1726-1744, 1764-1774, 1866-1961 and 2058-2088. In some embodiments, the guide polynucleotide hybridizes or targets a sequence complementary to any one of SEQ ID NOs: 1726-1744, 1764-1774, 1866-1961, and 2058-2088 or a sequence having at least 90%, 95%, 97%, 98%, or 99% sequence identity to any one of SEQ ID NOs: 1726-1744, 1764-1774, 1866-1961, and 2058-2088.

[0336] In some embodiments, the guide polynucleotide hybridizes or targets a sequence according to any one of SEQ ID NOs: 1745-1763, 1775-1785, 1962-2057, and 2089-2119 or a sequence having at least 90%, 95%, 97%, 98%, or 99% sequence identity to any one of SEQ ID NOs: 1745-1763, 1775-1785, 1962-2057, and 2089-2119. In some embodiments, the target nucleic acid sequence comprises a sequence having at least 90% sequence identity to any one of SEQ ID NOs: 1745-1763, 1775-1785, 1962-2057, and 2089-2119.

[0337] In some embodiments, the engineered nuclease system comprises an endonuclease comprising a sequence having at least about 70% identity to any one of SEQ ID NOs: 1-27 and 771-862 and an engineered guide polynucleotide configured to form a complex with the endonuclease and comprising a spacer sequence configured to hybridize to at least a portion of a target nucleic acid sequence within a HAO1 gene or within an intron of an endogenous gene, the engineered guide polynucleotide comprising a sequence having at least about 70% identity to any one of SEQ ID NOs: 611-633, 1789-1826, and 1827-1865. In some embodiments, the engineered nuclease system comprises an endonuclease comprising a sequence having at least about 75% identity to any one of SEQ ID NOs: 1-27 and 771-862 and an engineered guide polynucleotide configured to form a complex with the endonuclease and comprising a spacer sequence configured to hybridize to at least a portion of a target nucleic acid sequence within a HAO1 gene or within an intron of an endogenous gene, the engineered guide polynucleotide comprising a sequence having at least about 75% identity to any one of SEQ ID NOs: 611-633, 1789-1826, and 1827-1865. In some embodiments, the engineered nuclease system comprises an endonuclease comprising a sequence having at least about 80% identity to any one of SEQ ID NOs: 1-27 and 771-862 and an engineered guide polynucleotide configured to form a complex with the endonuclease and comprising a spacer sequence configured to hybridize to at least a portion of a target nucleic acid sequence within a HAO1 gene or within an intron of an endogenous gene, the engineered guide polynucleotide comprising a sequence having at least about 80% identity to any one of SEQ ID NOs: 611-633, 1789-1826, and 1827-1865. In some embodiments, the engineered nuclease system comprises an endonuclease comprising a sequence having at least about 85% identity to any one of SEQ ID NOs: 1-27 and 771-862 and an engineered guide polynucleotide configured to form a complex with the endonuclease and comprising a spacer sequence configured to hybridize to at least a portion of a target nucleic acid sequence within a HAO1 gene or within an intron of an endogenous gene, the engineered guide polynucleotide comprising a sequence having at least about 85% identity to any one of SEQ ID NOs: 611-633, 1789-1826, and 1827-1865. In some embodiments, the engineered nuclease system comprises an endonuclease comprising a sequence having at least about 90% identity to any one of SEQ ID NOs: 1-27 and 771-862 and an engineered guide polynucleotide configured to form a complex with the endonuclease and comprising a spacer sequence configured to hybridize to at least a portion of a target nucleic acid sequence within a HAO1 gene or within an intron of an endogenous gene, the engineered guide polynucleotide comprising a sequence having at least about 90% identity to any one of SEQ ID NOs: 611-633, 1789-1826, and 1827-1865. In some embodiments, the engineered nuclease system comprises an endonuclease comprising a sequence having at least about 95% identity to any one of SEQ ID NOs: 1-27 and 771-862 and an engineered guide polynucleotide configured to form a complex with the endonuclease and comprising a spacer sequence configured to hybridize to at least a portion of a target nucleic acid sequence within a HAO1 gene or within an intron of an endogenous gene, the engineered guide polynucleotide comprising a sequence having at least about 95% identity to any one of SEQ ID NOs: 611-633, 1789-1826, and 1827-1865. In some embodiments, the engineered nuclease system comprises an endonuclease comprising a sequence having at least about 96% identity to any one of SEQ ID NOs: 1-27 and 771-862 and an engineered guide polynucleotide configured to form a complex with the endonuclease and comprising a spacer sequence configured to hybridize to at least a portion of a target nucleic acid sequence within a HAO1 gene or within an intron of an endogenous gene, the engineered guide polynucleotide comprising a sequence having at least about 96% identity to any one of SEQ ID NOs: 611-633, 1789-1826, and 1827-1865. In some embodiments, the engineered nuclease system comprises an endonuclease comprising a sequence having at least about 97% identity to any one of SEQ ID NOs: 1-27 and 771-862 and an engineered guide polynucleotide configured to form a complex with the endonuclease and comprising a spacer sequence configured to hybridize to at least a portion of a target nucleic acid sequence within a HAO1 gene or within an intron of an endogenous gene, the engineered guide polynucleotide comprising a sequence having at least about 97% identity to any one of SEQ ID NOs: 611-633, 1789-1826, and 1827-1865. In some embodiments, the engineered nuclease system comprises an endonuclease comprising a sequence having at least about 98% identity to any one of SEQ ID NOs: 1-27 and 771-862 and an engineered guide polynucleotide configured to form a complex with the endonuclease and comprising a spacer sequence configured to hybridize to at least a portion of a target nucleic acid sequence within a HAO1 gene or within an intron of an endogenous gene, the engineered guide polynucleotide comprising a sequence having at least about 98% identity to any one of SEQ ID NOs: 611-633, 1789-1826, and 1827-1865. In some embodiments, the engineered nuclease system comprises an endonuclease comprising a sequence having at least about 99% identity to any one of SEQ ID NOs: 1-27 and 771-862 and an engineered guide polynucleotide configured to form a complex with the endonuclease and comprising a spacer sequence configured to hybridize to at least a portion of a target nucleic acid sequence within a HAO1 gene or within an intron of an endogenous gene, the engineered guide polynucleotide comprising a sequence having at least about 99% identity to any one of SEQ ID NOs: 611-633, 1789-1826, and 1827-1865. In some embodiments, the engineered nuclease system comprises an endonuclease comprising 100% identity to any one of SEQ ID NOs: 1-27 and 771-862 and an engineered guide polynucleotide configured to form a complex with the endonuclease and comprising a spacer sequence configured to hybridize to at least a portion of a target nucleic acid sequence within a HAO1 gene or within an intron of an endogenous gene, the engineered guide polynucleotide comprising 100% identity to any one of SEQ ID NOs: 611-633, 1789-1826, and 1827-1865. In some embodiments, the guide polynucleotide hybridizes or targets a sequence complementary to any one of SEQ ID NOs: 611-633, 1789-1826, and 1827-1865 or a sequence having at least 90%, 95%, 97%, 98%, or 99% sequence identity to any one of SEQ ID NOs: 611-633, 1789-1826, and 1827-1865.

### Cells

[0338] Described herein, in certain embodiments, is a cell comprising engineered endonuclease systems described herein.

[0339] In some embodiments, the cell is a eukaryotic cell (e.g., a plant cell, an animal cell, a protist cell, or a fungi cell), a mammalian cell (a Chinese hamster ovary (CHO) cell, baby hamster kidney (BHK), human embryo kidney (HEK), mouse myeloma (NSO), or human retinal cells), an immortalized cell (e.g., a HeLa cell, a COS cell, a HEK-293T cell, a MDCK cell, a 3T3 cell, a PC12 cell, a Huh7 cell, a HepG2 cell, a K562 cell, a N2a cell, or a SY5Y cell), an insect cell (e.g., a Spodoptera frugiperda cell, a Trichoplusia ni cell, a Drosophila melanogaster cell, a S2 cell, or a Heliothis virescens cell), a yeast cell (e.g., a Saccharomyces cerevisiae cell, a Cryptococcus cell, or a Candida cell), a plant cell (e.g., a parenchyma cell, a collenchyma cell, or a sclerenchyma cell), a fungal cell (e.g., a Saccharomyces cerevisiae cell, a Cryptococcus cell, or a Candida cell), or a prokaryotic cell (e.g., a E. coli cell, a Streptococcus bacterium cell, a Streptomyces soil bacteria cell, or an archaea cell). In some embodiments, the cell is a eukaryotic cell. In some embodiments, the cell is a mammalian cell. In some embodiments, the cell is an immortalized cell. In some embodiments, the cell is an insect cell. In some embodiments, the cell is a yeast cell. In some embodiments, the cell is a plant cell. In some embodiments, the cell is a fungal cell. In some embodiments, the cell is a prokaryotic cell.

[0340] In some embodiments, the cell is an A549, HEK-293, HEK-293T, BHK, CHO, HeLa, MRC5, Sf9, Cos-1, Cos-7, Vero, BSC 1, BSC 40, BMT 10, WI38, HeLa, Saos, C2C12, L cell, HT1080, HepG2, Huh7, K562, a primary cell, or derivative thereof. In some embodiments, the primary cell is a T cell. In some embodiments, the primary cell is a hematopoietic stem cell (HSC).

### Delivery and Vectors

[0341] Disclosed herein, in some embodiments, are nucleic acid sequences encoding an engineered nuclease system comprising an engineered endonuclease (e.g. a fusion endonuclease or a chimeric nuclease) and a guide polynucleotide, an engineered endonuclease, or a guide polynucleotide.

[0342] In some embodiments, the nucleic acid encoding the engineered endonuclease system is a DNA, for example a linear DNA, a plasmid DNA, or a minicircle DNA. In some embodiments, the nucleic acid encoding the engineered nuclease system is an RNA, for example a mRNA.

[0343] In some embodiments, the nucleic acid encoding the engineered endonuclease system is delivered by a nucleic acid-based vector. In some embodiments, the nucleic acid-based vector is a plasmid (e.g., circular DNA molecules that can autonomously replicate inside a cell), cosmid (e.g., pWE or sCos vectors), artificial chromosome, human artificial chromosome (HAC), yeast artificial chromosomes (YAC), bacterial artificial chromosome (BAC), P1-derived artificial chromosomes (PAC), phagemid, phage derivative, bacmid, or virus. In some embodiments, the nucleic acid-based vector is selected from the list consisting of: pSF-CMV-NEO-NH2-PPT-3XFLAG, pSF-CMV-NEO—COOH-3XFLAG, pSF-CMV—PURO-NH2-GST-TEV, pSF-OXB20-COOH-TEV-FLAG(R)-6His, pCEP4 pDEST27, pSF-CMV-Ub-KrYFP, pSF-CMV-FMDV-daGFP, pEFla-mCherry-N1 vector, pEFla-tdTomato vector, pSF-CMV-FMDV-Hygro, pSF-CMV-PGK-Puro, pMCP-tag(m), pSF-CMV—PURO-NH2-CMYC, pSF-OXB20-BetaGal, pSF-OXB20-Fluc, pSF-OXB20, pSF-Tac, pRI 101-AN DNA, pCambia2301, pTYB21, pKLAC2, pAc5.1/V5-His A, and pDEST8.

[0344] In some embodiments, the nucleic acid-based vector comprises a promoter. In some embodiments, the promoter is selected from the group consisting of a mini promoter, an inducible promoter, a constitutive promoter, and derivatives thereof. In some embodiments, the promoter is selected from the group consisting of CMV, CBA, EF1a, CAG, PGK, TRE, U6, UAS, T7, Sp6, lac, araBad, trp, Ptac, p5, p19, p40, Synapsin, CaMKII, GRK1, and derivatives thereof. In some embodiments the promoter is a U6 promoter. In some embodiments, the promoter is a CAG promoter.

[0345] In some embodiments, the nucleic acid-based vector is a virus. In some embodiments, the virus is an alphavirus, a parvovirus, an adenovirus, an AAV, a baculovirus, a Dengue virus, a lentivirus, a herpesvirus, a poxvirus, an anellovirus, a bocavirus, a vaccinia virus, or a retrovirus. In some embodiments, the virus is an alphavirus. In some embodiments, the virus is a parvovirus. In some embodiments, the virus is an adenovirus. In some embodiments, the virus is an AAV. In some embodiments, the virus is a baculovirus. In some embodiments, the virus is a Dengue virus. In some embodiments, the virus is a lentivirus. In some embodiments, the virus is a herpesvirus. In some embodiments, the virus is a poxvirus. In some embodiments, the virus is an anellovirus. In some embodiments, the virus is a bocavirus. In some embodiments, the virus is a vaccinia virus. In some embodiments, the virus is or a retrovirus.

[0346] In some embodiments, the AAV is AAV1, AAV2, AAV3, AAV4, AAV5, AAV6, AAV7, AAV8, AAV9, AAV10, AAV11, AAV12, AAV13, AAV14, AAV15, AAV16, AAV-rh8, AAV-rh10, AAV-rh20, AAV-rh39, AAV-rh74, AAV-rhM4-1, AAV-hu37, AAV-Anc80, AAV-Anc80L65, AAV-7m8, AAV-PHP-B, AAV-PHP-EB, AAV-2.5, AAV-2tYF, AAV-3B, AAV-LK03, AAV-HSC1, AAV-HSC2, AAV-HSC3, AAV-HSC4, AAV-HSC5, AAV-HSC6, AAV-HSC7, AAV-HSC8, AAV-HSC9, AAV-HSC10, AAV-HSC11, AAV-HSC12, AAV-HSC13, AAV-HSC14, AAV-HSC15, AAV-TT, AAV-DJ/8, AAV-Myo, AAV-NP40, AAV-NP59, AAV-NP22, AAV-NP66, AAV-HSC16, or a derivative thereof. In some embodiments, the herpesvirus is HSV type 1, HSV-2, VZV, EBV, CMV, HHV-6, HHV-7, or HHV-8.

[0347] In some embodiments, the virus is AAV1 or a derivative thereof. In some embodiments, the virus is AAV2 or a derivative thereof. In some embodiments, the virus is AAV3 or a derivative thereof. In some embodiments, the virus is AAV4 or a derivative thereof. In some embodiments, the virus is AAV5 or a derivative thereof. In some embodiments, the virus is AAV6 or a derivative thereof. In some embodiments, the virus is AAV7 or a derivative thereof. In some embodiments, the virus is AAV8 or a derivative thereof. In some embodiments, the virus is AAV9 or a derivative thereof. In some embodiments, the virus is AAV10 or a derivative thereof. In some embodiments, the virus is AAV 11 or a derivative thereof. In some embodiments, the virus is AAV12 or a derivative thereof. In some embodiments, the virus is AAV13 or a derivative thereof. In some embodiments, the virus is AAV14 or a derivative thereof. In some embodiments, the virus is AAV15 or a derivative thereof. In some embodiments, the virus is AAV16 or a derivative thereof. In some embodiments, the virus is AAV-rh8 or a derivative thereof. In some embodiments, the virus is AAV-rh10 or a derivative thereof. In some embodiments, the virus is AAV-rh20 or a derivative thereof. In some embodiments, the virus is AAV-rh39 or a derivative thereof. In some embodiments, the virus is AAV-rh74 or a derivative thereof. In some embodiments, the virus is AAV-rhM4-1 or a derivative thereof. In some embodiments, the virus is AAV-hu37 or a derivative thereof. In some embodiments, the virus is AAV-Anc80 or a derivative thereof. In some embodiments, the virus is AAV-Anc80L65 or a derivative thereof. In some embodiments, the virus is AAV-7m8 or a derivative thereof. In some embodiments, the virus is AAV-PHP-B or a derivative thereof. In some embodiments, the virus is AAV-PHP-EB or a derivative thereof. In some embodiments, the virus is AAV-2.5 or a derivative thereof. In some embodiments, the virus is AAV-2tYF or a derivative thereof. In some embodiments, the virus is AAV-3B or a derivative thereof. In some embodiments, the virus is AAV-LK03 or a derivative thereof. In some embodiments, the virus is AAV-HSC1 or a derivative thereof. In some embodiments, the virus is AAV-HSC2 or a derivative thereof. In some embodiments, the virus is AAV-HSC3 or a derivative thereof. In some embodiments, the virus is AAV-HSC4 or a derivative thereof. In some embodiments, the virus is AAV-HSC5 or a derivative thereof. In some embodiments, the virus is AAV-HSC6 or a derivative thereof. In some embodiments, the virus is AAV-HSC7 or a derivative thereof. In some embodiments, the virus is AAV-HSC8 or a derivative thereof. In some embodiments, the virus is AAV-HSC9 or a derivative thereof. In some embodiments, the virus is AAV-HSC10 or a derivative thereof. In some embodiments, the virus is AAV-HSC11 or a derivative thereof. In some embodiments, the virus is AAV-HSC12 or a derivative thereof. In some embodiments, the virus is AAV-HSC13 or a derivative thereof. In some embodiments, the virus is AAV-HSC14 or a derivative thereof. In some embodiments, the virus is AAV-HSC15 or a derivative thereof. In some embodiments, the virus is AAV-TT or a derivative thereof. In some embodiments, the virus is AAV-DJ/8 or a derivative thereof. In some embodiments, the virus is AAV-Myo or a derivative thereof. In some embodiments, the virus is AAV-NP40 or a derivative thereof. In some embodiments, the virus is AAV-NP59 or a derivative thereof. In some embodiments, the virus is AAV-NP22 or a derivative thereof. In some embodiments, the virus is AAV-NP66 or a derivative thereof. In some embodiments, the virus is AAV-HSC16 or a derivative thereof.

[0348] In some embodiments, the virus is HSV-1 or a derivative thereof. In some embodiments, the virus is HSV-2 or a derivative thereof. In some embodiments, the virus is VZV or a derivative thereof. In some embodiments, the virus is EBV or a derivative thereof. In some embodiments, the virus is CMV or a derivative thereof. In some embodiments, the virus is HHV-6 or a derivative thereof. In some embodiments, the virus is HHV-7 or a derivative thereof. In some embodiments, the virus is HHV-8 or a derivative thereof.

[0349] In some embodiments, the nucleic acid encoding the engineered endonuclease or the engineered endonuclease system is delivered by a non-nucleic acid-based delivery system (e.g., a non-viral delivery system). In some embodiments, the non-viral delivery system is a liposome. In some embodiments, the nucleic acid is associated with a lipid. The nucleic acid associated with a lipid, in some embodiments, is encapsulated in the aqueous interior of a liposome, interspersed within the lipid bilayer of a liposome, attached to a liposome via a linking molecule that is associated with both the liposome and the nucleic acid, entrapped in a liposome, complexed with a liposome, dispersed in a solution containing a lipid, mixed with a lipid, combined with a lipid, contained as a suspension in a lipid, contained or complexed with a micelle, or otherwise associated with a lipid. In some embodiments, the nucleic acid is comprised in a lipid nanoparticle (LNP).

[0350] In some embodiments, the engineered endonuclease or the engineered endonuclease system is introduced into the cell in any suitable way, either stably or transiently. In some embodiments, the engineered endonuclease or the engineered endonuclease system is transfected into the cell. In some embodiments, the cell is transduced or transfected with a nucleic acid construct that encodes the engineered endonuclease or the engineered endonuclease system. For example, a cell is transduced (e.g., with a virus encoding the engineered endonuclease or the engineered endonuclease system), or transfected (e.g., with a plasmid encoding the engineered endonuclease or the engineered endonuclease system) with a nucleic acid that encodes the engineered endonuclease or the engineered endonuclease system, or the translated the engineered endonuclease or the engineered endonuclease system. In some embodiments, the transduction is a stable or transient transduction. In some embodiments, cells expressing the engineered endonuclease or the engineered endonuclease system or containing the engineered endonuclease or the engineered endonuclease system are transduced or transfected with one or more gRNA molecules, for example, when the engineered endonuclease or the engineered endonuclease system comprises a CRISPR nuclease. In some embodiments, a plasmid expressing the engineered endonuclease or the engineered endonuclease system is introduced into cells through electroporation, transient (e.g., lipofection) and stable genome integration (e.g., piggybac) and viral transduction (for example lentivirus or AAV) or other methods known to those of skill in the art. In some embodiments, the gene editing system is introduced into the cell as one or more polypeptides. In some embodiments, delivery is achieved through the use of RNP complexes. Delivery methods to cells for polypeptides and/or RNPs are known in the art, for example by electroporation or by cell squeezing.

[0351] Exemplary methods of delivery of nucleic acids include lipofection, nucleofection, electroporation, stable genome integration (e.g., piggybac), microinjection, biolistics, virosomes, liposomes, immunoliposomes, polycation or lipid nucleic acid conjugates, naked DNA, artificial virions, and agent-enhanced uptake of DNA. Lipofection is described in e.g., U.S. Pat. Nos. 5,049,386; 4,946,787; and 4,897,355) and lipofection reagents are sold commercially (e.g., Transfectam™, Lipofectin™ and SF Cell Line 4D-Nucleofector X Kit™ (Lonza)). Cationic and neutral lipids that are suitable for efficient receptor-recognition lipofection of polynucleotides include those of WO 91/17424 and WO 91/16024. In some embodiments, the delivery is to cells (e.g., in vitro or ex vivo administration) or target tissues (e.g., in vivo administration). In some embodiments, the nucleic acid is comprised in a liposome or a nanoparticle that specifically targets a host cell.

[0352] Additional methods for the delivery of nucleic acids to cells are known to those skilled in the art. See, for example, US 2003/0087817.

[0353] In some embodiments, the present disclosure provides a cell comprising a vector or a nucleic acid described herein. In some embodiments, the cell expresses a gene editing system or parts thereof. In some embodiments, the cell is a human cell. In some embodiments, the cell is genome edited ex vivo. In some embodiments, the cell is genome edited in vivo.

### Lipid Nanoparticles

[0354] Disclosed herein, in certain embodiments, are lipid nanoparticles comprising an engineered endonuclease system of the disclosure for delivery of the engineered endonuclease systems into a cell.

[0355] In some embodiments, the lipid nanoparticle comprises the engineered endonuclease system. In some embodiments, the lipid nanoparticle comprises the engineered endonuclease or a nucleic acid encoding the engineered endonuclease and an engineered guide polynucleotide. In some embodiments, the lipid nanoparticle comprises the one or more components of the engineered endonuclease system. In some embodiments, the lipid nanoparticle comprises the engineered endonuclease or a nucleic acid encoding the engineered endonuclease. In some embodiments, the lipid nanoparticle comprises the engineered guide polynucleotide.

[0356] In some embodiments, the lipid nanoparticle is tethered to the engineered endonuclease system.

[0357] In some embodiments, the lipid nanoparticle is used to deliver the engineered endonuclease system or components thereof to a cell. In some embodiments, the cell is a specific cell type. In some embodiments, the cell is a eukaryotic cell (e.g., a plant cell, an animal cell, a protist cell, or a fungi cell), a mammalian cell (a Chinese hamster ovary (CHO) cell, baby hamster kidney (BHK), human embryo kidney (HEK), mouse myeloma (NSO), or human retinal cells), an immortalized cell (e.g., a HeLa cell, a COS cell, a HEK-293T cell, a MDCK cell, a 3T3 cell, a PC12 cell, a Huh7 cell, a HepG2 cell, a K562 cell, a N2a cell, or a SY5Y cell), an insect cell (e.g., a Spodoptera frugiperda cell, a Trichoplusia ni cell, a Drosophila melanogaster cell, a S2 cell, or a Heliothis virescens cell), a yeast cell (e.g., a Saccharomyces cerevisiae cell, a Cryptococcus cell, or a Candida cell), a plant cell (e.g., a parenchyma cell, a collenchyma cell, or a sclerenchyma cell), a fungal cell (e.g., a Saccharomyces cerevisiae cell, a Cryptococcus cell, or a Candida cell), or a prokaryotic cell (e.g., a E. coli cell, a streptococcus bacterium cell, a streptomyces soil bacteria cell, or an archaea cell). In some embodiments, the cell is a eukaryotic cell. In some embodiments, the cell is a mammalian cell. In some embodiments, the cell is an immortalized cell. In some embodiments, the cell is an insect cell. In some embodiments, the cell is a yeast cell. In some embodiments, the cell is a plant cell. In some embodiments, the cell is a fungal cell. In some embodiments, the cell is a prokaryotic cell. In some embodiments, the cell is an A549, HEK-293, HEK-293T, BHK, CHO, HeLa, MRC5, Sf9, Cos-1, Cos-7, Vero, BSC 1, BSC 40, BMT 10, WI38, HeLa, Saos, C2C12, L cell, HT1080, HepG2, Huh7, K562, a primary cell, or derivative thereof. In some embodiments, the primary cell is a T cell. In some embodiments, the primary cell is a hematopoietic stem cell (HSC).

[0358] Lipid nanoparticles as described herein can be 4-component lipid nanoparticles. Such nanoparticles can be configured for delivery of RNA or other nucleic acids (e.g., synthetic RNA, mRNA, or in vitro-synthesized mRNA) and can be generally formulated as described in WO2012135805A2. Such nanoparticles can generally comprise: (a) a cationic lipid (e.g., any of the lipids described in FIG. 45), (b) a neutral lipid (e.g., DSPC or DOPE), (c) a sterol (e.g., cholesterol or a cholesterol analog), or (d) a PEG-modified lipid (e.g., PEG-DMG).

[0359] The cationic lipid referred to herein as “C12-200” is disclosed by Love et al., Proc Natl Acad Sci USA. 2010 107:1864-1869 and Liu and Huang, Molecular Therapy. 2010 669-670. Cationic lipid formulations can include particles comprising either 3 or 4 or more components in addition to polynucleotide, primary construct, or RNA (e.g., mRNA). As an example, formulations with certain cationic lipids, include, but are not limited to, 98N12-5 (or any of the other structures described in FIG. 45) and may contain 42% lipidoid, 48% cholesterol and 10% PEG (C14 or greater alkyl chain length). As another example, formulations with certain lipidoids include, but are not limited to, C12-200 and may contain 50% cationic lipid, 10% disteroylphosphatidyl choline, 38.5% cholesterol, and 1.5% PEG-DMG.

[0360] In some embodiments, lipid nanoparticles are formulated as described in U.S. Ser. No. 10/709,779. In some embodiments, the cationic lipid nanoparticle comprises a cationic lipid, a PEG-modified lipid, a sterol, and a non-cationic lipid. In some embodiments, the cationic lipid is selected from the group consisting of, or comprising any of, the cationic lipids depicted in FIG. 45. In some embodiments, the cationic lipid nanoparticle has a molar ratio of about 20-60% cationic lipid: about 5-25% non-cationic lipid: about 25-55% sterol; and about 0.5-15% PEG-modified lipid. In some embodiments, the cationic lipid nanoparticle comprises a molar ratio of about 50% cationic lipid, about 1.5% PEG-modified lipid, about 38.5% cholesterol, and about 10% non-cationic lipid. In some embodiments, the cationic lipid nanoparticle comprises a molar ratio of about 55% cationic lipid, about 2.5% PEG-modified lipid, about 32.5% cholesterol, and about 10% non-cationic lipid. In some embodiments, the cationic lipid is an ionizable cationic lipid, the non-cationic lipid is a neutral lipid, and the sterol is a cholesterol. In some embodiments, the cationic lipid nanoparticle has a molar ratio of 50:38.5:10:1.5 of cationic lipid: cholesterol: PEG2000-DMG:DSPC or DMG:DOPE. In some embodiments, lipid nanoparticles as described herein can comprise cholesterol, 1,2-dioleoyl-sn-glycero-3-phosphoethanolamine (DOPE), 1,1′-((2-(4-(2-((2-(bis(2-hydroxydodecyl)amino)ethyl)(2-hydroxydodecyl)amino)ethyl)piperazin-1-yl)ethyl)azanediyl)bis(dodecan-2-ol) (C12-200), and DMG-PEG-2000 at molar ratios of 47.5:16:35:1.5.

### Methods of Use

[0361] Gene editing systems of the present disclosure may be used for various applications, such as, for example, nucleic acid editing (e.g., gene editing) or binding to a nucleic acid molecule (e.g., sequence-specific binding). Such systems may be used, for example, for remediating (e.g., removing or replacing) a genetically inherited mutation that may cause a disease in a subject; inactivating a gene in order to ascertain its function in a cell; as a diagnostic tool to detect disease-causing genetic elements (e.g., via cleavage of reverse-transcribed viral RNA or an amplified DNA sequence encoding a disease-causing mutation); as deactivated enzymes in combination with a probe to target and detect a specific nucleotide sequence (e.g., sequence encoding antibiotic resistance int bacteria); to render viruses inactive or incapable of infecting host cells by targeting viral genomes; to add genes or amend metabolic pathways to engineer organisms to produce valuable small molecules, macromolecules, or secondary metabolites; to establish a gene drive element for evolutionary selection, and/or to detect cell perturbations by foreign small molecules and nucleotides as a biosensor.

[0362] Described herein, in some embodiments, are methods for gene editing using the engineered endonucleases (e.g., chimeric nucleases or fusion endonucleases) described herein. In some embodiments, the engineered nuclease is a class 2, type II endonuclease. In some embodiments, the type II endonuclease has a sequence having at least 55% (e.g., at least 60%, 65%, 70%, 75%, 80%, 85%, 90%, 95%, or 99%) identity to SEQ ID NO: 10.

[0363] Described herein, in certain embodiments, are methods for modifying a target nucleic acid comprising providing an engineered nuclease system disclosed herein to a cell. In some embodiments, the engineered nuclease system comprises an endonuclease and an engineered guide polynucleotide. In some embodiments, the target nucleic acid is double stranded. In some embodiments, the target nucleic acid is double stranded DNA. In some embodiments, the target nucleic acid is single stranded.

[0364] In some embodiments, the methods are used to introduce a modification in the genome of a cell. In some embodiments, the modification is an insertion, deletion, or mutation. In some embodiments, the methods are used to introduce site-directed insertions, deletions, and/or mutations in the genome of a cell (for example an insertion and a mutation). In some embodiments, the methods are used in combination with a nucleic acid template to facilitate site-directed insertions into the genome of a cell.

[0365] In some embodiments, the cell is a human cell. In some embodiments, the cell genome or a vector comprised in the cell is modified. In some embodiments, the cell genome is modified ex vivo. In some embodiments, the cell genome is modified in vivo. In some embodiments, methods described herein are for modifying an albumin gene. In some embodiments, methods described herein are for targeting an albumin gene in a cell. In some embodiments, the engineered guide polynucleotide (e.g., guide ribonucleic acid) is encoded by any one of SEQ ID NOs: 67-86 or a sequence having at least 90%, 95%, 97%, 98%, or 99% sequence identity to any one of SEQ ID NOs: 67-86. In some embodiments, the engineered guide polynucleotide is configured to hybridize to a sequence or target a sequence complementary to a sequence comprising any one of SEQ ID NOs: 67-86 or a sequence having at least 90%, 95%, 97%, 98%, or 99% sequence identity to any one of SEQ ID NOs: 67-86. In some embodiments, the engineered guide polynucleotide is configured to form a complex with the endonuclease and comprising a spacer sequence configured to hybridize to at least a portion of a target nucleic acid sequence within an albumin gene or within an intron of an endogenous gene, the engineered guide polynucleotide comprising a sequence having at least 90% sequence identity to any one of SEQ ID NOs: 67-86.

[0366] In some embodiments, methods described herein are for modifying a TRAC gene. In some embodiments, methods described herein are for targeting a TRAC gene in a cell. In some embodiments, the engineered guide polynucleotide (e.g., guide ribonucleic acid) is encoded by any one of SEQ ID NOs: 119-138, 922-924, 972-991, 1088-1183, 1280-1320, 2390-2485, and 2582-2617 or a sequence having at least 90%, 95%, 97%, 98%, or 99% sequence identity to any one of SEQ ID NOs: 119-138, 922-924, 972-991, 1088-1183, 1280-1320, 2390-2485, and 2582-2617. In some embodiments, the engineered guide polynucleotide is configured to hybridize to a sequence or target a sequence complementary to a sequence comprising any one of SEQ ID NOs: 119-138, 922-924, 972-991, 1088-1183, 1280-1320, 2390-2485, and 2582-2617 or a sequence having at least 90%, 95%, 97%, 98%, or 99% sequence identity to any one of SEQ ID NOs: 119-138, 922-924, 972-991, 1088-1183, 1280-1320, 2390-2485, and 2582-2617. In some embodiments, the engineered guide polynucleotide is configured to form a complex with the endonuclease and comprising a spacer sequence configured to hybridize to at least a portion of a target nucleic acid sequence within a TRAC gene or within an intron of an endogenous gene, the engineered guide polynucleotide comprising a sequence having at least 90% sequence identity to any one of SEQ ID NOs: 119-138, 922-924, 972-991, 1088-1183, 1280-1320, 2390-2485, and 2582-2617. In some embodiments, the gRNA hybridizes or targets a sequence according to any one of SEQ ID NOs: 139-158, 925-927, 992-1011, 1184-1279, 1321-1361, 2486-2581, and 2618-2653 or a sequence having at least 90%, 95%, 97%, 98%, or 99% sequence identity to any one of SEQ ID NOs: 139-158, 925-927, 992-1011, 1184-1279, 1321-1361, 2486-2581, and 2618-2653.

[0367] In some embodiments, methods described herein are for modifying a B2M gene. In some embodiments, methods described herein are for targeting a B2M gene in a cell. In some embodiments, the engineered guide polynucleotide (e.g., guide ribonucleic acid) is encoded by any one of SEQ ID NOs: 159-184 or a sequence having at least 90%, 95%, 97%, 98%, or 99% sequence identity to any one of SEQ ID NOs: 159-184. In some embodiments, the engineered guide polynucleotide is configured to hybridize to a sequence or target a sequence complementary to a sequence comprising any one of SEQ ID NOs: 159-184 or a sequence having at least 90%, 95%, 97%, 98%, or 99% sequence identity to any one of SEQ ID NOs: 159-184. In some embodiments, the engineered guide polynucleotide is configured to form a complex with the endonuclease and comprising a spacer sequence configured to hybridize to at least a portion of a target nucleic acid sequence within a B2M gene or within an intron of an endogenous gene, the engineered guide polynucleotide comprising a sequence having at least 90% sequence identity to any one of SEQ ID NOs: 159-184. In some embodiments, the gRNA hybridizes or targets a sequence according to any one of SEQ ID NOs: 185-210 or a sequence having at least 90%, 95%, 97%, 98%, or 99% sequence identity to any one of SEQ ID NOs: 185-210.

[0368] In some embodiments, methods described herein are for modifying a TRBC1 gene. In some embodiments, methods described herein are for targeting a TRBC1 gene in a cell. In some embodiments, the engineered guide polynucleotide (e.g., guide ribonucleic acid) is encoded by any one of SEQ ID NOs: 211-251 or a sequence having at least 90%, 95%, 97%, 98%, or 99% sequence identity to any one of SEQ ID NOs: 211-251. In some embodiments, the engineered guide polynucleotide is configured to hybridize to a sequence or target a sequence complementary to a sequence comprising any one of SEQ ID NOs: 211-251 or a sequence having at least 90%, 95%, 97%, 98%, or 99% sequence identity to any one of SEQ ID NOs: 211-251. In some embodiments, the engineered guide polynucleotide is configured to form a complex with the endonuclease and comprising a spacer sequence configured to hybridize to at least a portion of a target nucleic acid sequence within a TRBC1 gene or within an intron of an endogenous gene, the engineered guide polynucleotide comprising a sequence having at least 90% sequence identity to any one of SEQ ID NOs: 211-251. In some embodiments, the gRNA hybridizes or targets a sequence according to any one of SEQ ID NOs: 252-292 or a sequence having at least 90%, 95%, 97%, 98%, or 99% sequence identity to any one of SEQ ID NOs: 252-292.

[0369] In some embodiments, methods described herein are for modifying a TRBC2 gene. In some embodiments, methods described herein are for targeting a TRBC2 gene in a cell. In some embodiments, the engineered guide polynucleotide (e.g., guide ribonucleic acid) is encoded by any one of SEQ ID NOs: 293-337 or a sequence having at least 90%, 95%, 97%, 98%, or 99% sequence identity to any one of SEQ ID NOs: 293-337. In some embodiments, the engineered guide polynucleotide is configured to hybridize to a sequence or target a sequence complementary to a sequence comprising any one of SEQ ID NOs: 293-337 or a sequence having at least 90%, 95%, 97%, 98%, or 99% sequence identity to any one of SEQ ID NOs: 293-337. In some embodiments, the engineered guide polynucleotide is configured to form a complex with the endonuclease and comprising a spacer sequence configured to hybridize to at least a portion of a target nucleic acid sequence within a TRBC2 gene or within an intron of an endogenous gene, the engineered guide polynucleotide comprising a sequence having at least 90% sequence identity to any one of SEQ ID NOs: 293-337. In some embodiments, the gRNA hybridizes or targets a sequence according to any one of SEQ ID NOs: 338-382 or a sequence having at least 90%, 95%, 97%, 98%, or 99% sequence identity to any one of SEQ ID NOs: 338-382.

[0370] In some embodiments, methods described herein are for modifying an ANGPTL3 gene. In some embodiments, methods described herein are for targeting an ANGPTL3 gene in a cell. In some embodiments, the engineered guide polynucleotide (e.g., guide ribonucleic acid) is encoded by any one of SEQ ID NOs: 383-477, 1392-1489, 2120-2215, and 2312-2350 or a sequence having at least 90%, 95%, 97%, 98%, or 99% sequence identity to any one of SEQ ID NOs: 383-477, 1392-1489, 2120-2215, and 2312-2350. In some embodiments, the engineered guide polynucleotide is configured to hybridize to a sequence or target a sequence complementary to a sequence comprising any one of SEQ ID NOs: 383-477, 1392-1489, 2120-2215, and 2312-2350 or a sequence having at least 90%, 95%, 97%, 98%, or 99% sequence identity to any one of SEQ ID NOs: 383-477, 1392-1489, 2120-2215, and 2312-2350. In some embodiments, the engineered guide polynucleotide is configured to form a complex with the endonuclease and comprising a spacer sequence configured to hybridize to at least a portion of a target nucleic acid sequence within an ANGPTL3 gene or within an intron of an endogenous gene, the engineered guide polynucleotide comprising a sequence having at least 90% sequence identity to any one of SEQ ID NOs: 383-477, 1392-1489, 2120-2215, and 2312-2350. In some embodiments, the gRNA hybridizes or targets a sequence according to any one of SEQ ID NOs: 478-572, 1490-1587, 2216-2311, and 2351-2389 or a sequence having at least 90%, 95%, 97%, 98%, or 99% sequence identity to any one of SEQ ID NOs: 478-572, 1490-1587, 2216-2311, and 2351-2389.

[0371] In some embodiments, methods described herein are for modifying a PCSK9 gene. In some embodiments, methods described herein are for targeting a PCSK9 gene in a cell. In some embodiments, the engineered guide polynucleotide (e.g., guide ribonucleic acid) is encoded by any one of SEQ ID NOs: 573-587 and 1362-1376 or a sequence having at least 90%, 95%, 97%, 98%, or 99% sequence identity to any one of SEQ ID NOs: 573-587 and 1362-1376. In some embodiments, the engineered guide polynucleotide is configured to hybridize to a sequence or target a sequence complementary to a sequence comprising any one of SEQ ID NOs: 573-587 and 1362-1376 or a sequence having at least 90%, 95%, 97%, 98%, or 99% sequence identity to any one of SEQ ID NOs: 573-587 and 1362-1376. In some embodiments, the engineered guide polynucleotide is configured to form a complex with the endonuclease and comprising a spacer sequence configured to hybridize to at least a portion of a target nucleic acid sequence within a PCSK9 gene or within an intron of an endogenous gene, the engineered guide polynucleotide comprising a sequence having at least 90% sequence identity to any one of SEQ ID NOs: 573-587 and 1362-1376. In some embodiments, the gRNA hybridizes or targets a sequence according to any one of SEQ ID NOs: 588-602 and 1377-1391 or a sequence having at least 90%, 95%, 97%, 98%, or 99% sequence identity to any one of SEQ ID NOs: 588-602 and 1377-1391.

[0372] In some embodiments, methods described herein are for modifying a VCP gene. In some embodiments, methods described herein are for targeting a VCP gene in a cell. In some embodiments, the engineered guide polynucleotide (e.g., guide ribonucleic acid) is encoded by any one of SEQ ID NOs: 723-738 and 755-762 or a sequence having at least 90%, 95%, 97%, 98%, or 99% sequence identity to any one of SEQ ID NOs: 723-738 and 755-762. In some embodiments, the engineered guide polynucleotide is configured to hybridize to a sequence or target a sequence complementary to a sequence comprising any one of SEQ ID NOs: 723-738 and 755-762 or a sequence having at least 90%, 95%, 97%, 98%, or 99% sequence identity to any one of SEQ ID NOs: 723-738 and 755-762. In some embodiments, the engineered guide polynucleotide is configured to form a complex with the endonuclease and comprising a spacer sequence configured to hybridize to at least a portion of a target nucleic acid sequence within a VCP gene or within an intron of an endogenous gene, the engineered guide polynucleotide comprising a sequence having at least 90% sequence identity to any one of SEQ ID NOs: 723-738 and 755-762. In some embodiments, the gRNA hybridizes or targets a sequence according to any one of SEQ ID NOs: 739-754 and 763-770 or a sequence having at least 90%, 95%, 97%, 98%, or 99% sequence identity to any one of SEQ ID NOs: 739-754 and 763-770.

[0373] In some embodiments, methods described herein are for modifying an AAVS1 locus. In some embodiments, methods described herein are for targeting an AAVS1 locus in a cell. In some embodiments, the engineered guide polynucleotide (e.g., guide ribonucleic acid) is encoded by any one of SEQ ID NOs: 928-949 and 1012-1049 or a sequence having at least 90%, 95%, 97%, 98%, or 99% sequence identity to any one of SEQ ID NOs: 928-949 and 1012-1049. In some embodiments, the engineered guide polynucleotide is configured to hybridize to a sequence or target a sequence complementary to a sequence comprising any one of SEQ ID NOs: 928-949 and 1012-1049 or a sequence having at least 90%, 95%, 97%, 98%, or 99% sequence identity to any one of SEQ ID NOs: 928-949 and 1012-1049. In some embodiments, the engineered guide polynucleotide is configured to form a complex with the endonuclease and comprising a spacer sequence configured to hybridize to at least a portion of a target nucleic acid sequence within an AAVS1 locus or within an intron of an endogenous gene, the engineered guide polynucleotide comprising a sequence having at least 90% sequence identity to any one of SEQ ID NOs: 928-949 and 1012-1049. In some embodiments, the gRNA hybridizes or targets a sequence according to any one of SEQ ID NOs: 950-971 and 1050-1087 or a sequence having at least 90%, 95%, 97%, 98%, or 99% sequence identity to any one of SEQ ID NOs: 950-971 and 1050-1087.

[0374] In some embodiments, methods described herein are for modifying a GPR146 gene. In some embodiments, methods described herein are for targeting a GPR146 gene in a cell. In some embodiments, the engineered guide polynucleotide (e.g., guide ribonucleic acid) is encoded by any one of SEQ ID NOs: 1588-1656 or a sequence having at least 90%, 95%, 97%, 98%, or 99% sequence identity to any one of SEQ ID NOs: 1588-1656. In some embodiments, the engineered guide polynucleotide is configured to hybridize to a sequence or target a sequence complementary to a sequence comprising any one of SEQ ID NOs: 1588-1656 or a sequence having at least 90%, 95%, 97%, 98%, or 99% sequence identity to any one of SEQ ID NOs: 1588-1656. In some embodiments, the engineered guide polynucleotide is configured to form a complex with the endonuclease and comprising a spacer sequence configured to hybridize to at least a portion of a target nucleic acid sequence within a GPR146 gene or within an intron of an endogenous gene, the engineered guide polynucleotide comprising a sequence having at least 90% sequence identity to any one of SEQ ID NOs: 1588-1656. In some embodiments, the gRNA hybridizes or targets a sequence according to any one of SEQ ID NOs: 1657-1725 or a sequence having at least 90%, 95%, 97%, 98%, or 99% sequence identity to any one of SEQ ID NOs: 1657-1725.

[0375] In some embodiments, methods described herein are for modifying an APOA1 gene. In some embodiments, methods described herein are for targeting an APOA1 gene in a cell. In some embodiments, the engineered guide polynucleotide (e.g., guide ribonucleic acid) is encoded by any one of SEQ ID NOs: 1726-1744, 1764-1774, 1866-1961, and 2058-2088 or a sequence having at least 90%, 95%, 97%, 98%, or 99% sequence identity to any one of SEQ ID NOs: 1726-1744, 1764-1774, 1866-1961, and 2058-2088. In some embodiments, the engineered guide polynucleotide is configured to hybridize to a sequence or target a sequence complementary to a sequence comprising any one of SEQ ID NOs: 1726-1744, 1764-1774, 1866-1961, and 2058-2088 or a sequence having at least 90%, 95%, 97%, 98%, or 99% sequence identity to any one of SEQ ID NOs: 1726-1744, 1764-1774, 1866-1961, and 2058-2088. In some embodiments, the engineered guide polynucleotide is configured to form a complex with the endonuclease and comprising a spacer sequence configured to hybridize to at least a portion of a target nucleic acid sequence within an APOA1 gene or within an intron of an endogenous gene, the engineered guide polynucleotide comprising a sequence having at least 90% sequence identity to any one of SEQ ID NOs: 1726-1744, 1764-1774, 1866-1961, and 2058-2088. In some embodiments, the gRNA hybridizes or targets a sequence according to any one of SEQ ID NOs: 1745-1763, 1775-1785, 1962-2057, and 2089-2119 or a sequence having at least 90%, 95%, 97%, 98%, or 99% sequence identity to any one of SEQ ID NOs: 1745-1763, 1775-1785, 1962-2057, and 2089-2119.

[0376] In some embodiments, methods described herein are for modifying a HAO1 gene. In some embodiments, methods described herein are for targeting a HAO1 gene in a cell. In some embodiments, the engineered guide polynucleotide (e.g., guide ribonucleic acid) is encoded by any one of SEQ ID NOs: 611-633, 1789-1826, and 1827-1865 or a sequence having at least 90%, 95%, 97%, 98%, or 99% sequence identity to any one of SEQ ID NOs: 611-633, 1789-1826, and 1827-1865. In some embodiments, the engineered guide polynucleotide is configured to hybridize to a sequence or target a sequence complementary to a sequence comprising any one of SEQ ID NOs: 611-633, 1789-1826, and 1827-1865 or a sequence having at least 90%, 95%, 97%, 98%, or 99% sequence identity to any one of SEQ ID NOs: 611-633, 1789-1826, and 1827-1865. In some embodiments, the engineered guide polynucleotide is configured to form a complex with the endonuclease and comprising a spacer sequence configured to hybridize to at least a portion of a target nucleic acid sequence within a HAO1 gene or within an intron of an endogenous gene, the engineered guide polynucleotide comprising a sequence having at least 90% sequence identity to any one of SEQ ID NOs: 611-633, 1789-1826, and 1827-1865.

### Kits

[0377] In some embodiments, this disclosure provides kits comprising one or more nucleic acid constructs encoding the various components of the chimeric nuclease or gene editing system described herein, e.g., comprising a nucleotide sequence encoding the components of the chimeric nuclease or gene editing system capable of modifying a target DNA sequence. In some embodiments, the nucleotide sequence comprises a heterologous promoter that drives expression of the gene editing system components.

[0378] In some embodiments, any of the chimeric nuclease or gene editing systems disclosed herein is assembled into a pharmaceutical, diagnostic, or research kit to facilitate its use in therapeutic, diagnostic, or research applications. A kit may include one or more containers housing any of the vectors disclosed herein and instructions for use.

[0379] The kit may be designed to facilitate use of the methods described herein by researchers and can take many forms. Each of the compositions of the kit, where applicable, may be provided in liquid form (e.g., in solution), or in solid form, (e.g., a dry powder). In certain cases, some of the compositions may be constitutable or otherwise processable (e.g., to an active form), for example, by the addition of a suitable solvent or other species (for example, water or a cell culture medium), which may or may not be provided with the kit. As used herein, “instructions” can define a component of instruction and/or promotion, and typically involve written instructions on or associated with packaging of the disclosure. Instructions also can include any oral or electronic instructions provided in any manner such that a user will clearly recognize that the instructions are to be associated with the kit, for example, audiovisual (e.g., videotape, DVD, etc.), Internet, and/or web-based communications, etc. The written instructions, in some embodiments, are in a form prescribed by a governmental agency regulating the manufacture, use, or sale of pharmaceuticals or biological products, which instructions can also reflect approval by the agency of manufacture, use, or sale for animal administration.

### EXAMPLES

[0380] The following examples are given for the purpose of illustrating various embodiments of the disclosure and are not meant to limit the present disclosure in any fashion. The present examples, along with the methods described herein, are presently representative of preferred embodiments, are exemplary, and are not intended as limitations on the scope of the disclosure. Changes therein and other uses which are encompassed within the spirit of the disclosure as defined by the scope of the claims will occur to those skilled in the art.

### Example 1—Plasmids

[0381] Chimera sequences were codon optimized for E. coli expression, and synthesized and cloned into pET21 vector. To construct pET21-MG3-6+MG15-1(WP) and pET21-MG3-6+MG15-1(P), gene fragments were amplified from pMGX3-6 and pMGX15-1 using primers P441-P446. The resulting PCR products were purified and assembled into pAL3 (digested by ClaI and XhoI). DNA sequences of cloned chimeric genes were confirmed by Sanger sequencing.

### Example 2—Bioinformatic Analysis

[0382] CRISPR Type II endonucleases utilized herein were predicted to have nuclease activity based on the presence of putative HNH and RuvC catalytic residues. In addition, structural predictions suggested residues involved in guide, target, and recognition of and interaction with a PAM. Based on the location of important residues, the predicted domain architecture of Type II CRISPR endonucleases comprised three RuvC domains, an HNH endonuclease domain, a recognition domain and PAM interacting domain, among others. For genomic sequences encoding a full-length Type II endonuclease next to a CRISPR array, tracrRNA sequences were predicted, which were engineered to be used by the nuclease as single guide RNAs.

[0383] A multiple sequence alignment of selected RNA guided CRISPR Type II endonuclease sequences were performed (see FIG. 3A). Protein structures of MG3-6 and MG15-1 were predicted and displayed. Details of chimeric compositions are shown in Table 1B. Guided by predicted structural model information along with guide RNA optimization (see FIG. 7), protein variants recognizing non-canonical PAMs by concatenating domains from closely, as well as distantly related Type II CRISPR endonucleases were engineered.

TABLE 1B
Chimeric Compositions

| | | | Example |
|---|---|---|---|
| | | | Sequence |
| | | | (SEQ |
| Chimera | N-terminus | C-terminus | ID NO:) |
| MG3-6 + MG1-4 | MG3-6 (1-742) | MG1-4 (750-1025) | 1 |
| MG3-6 + MG1-5 | MG3-6 (1-742) | MG1-5 (789-1077) | 2 |
| MG3-6 + MG1-6 | MG3-6 (1-742) | MG1-6 (773-1059) | 3 |
| MG3-6 + MG1-7 | MG3-6 (1-742) | MG1-7 (775-1061) | 4 |
| MG3-6 + MG2-4 | MG3-6 (1-742) | MG2-4 (876-1201) | 5 |
| MG3-6 + MG2-7 | MG3-6 (1-742) | MG2-7 (817-1080) | 6 |
| MG3-6 + MG3-1 | MG3-6 (1-742) | MG3-1 (684-1050) | 7 |
| MG3-6 + MG3-2 | MG3-6 (1-742) | MG3-2 (755-1134) | 8 |
| MG3-6 + MG3-3 | MG3-6 (1-742) | MG3-3 (750-1132) | 9 |
| MG3-6 + MG3-4 | MG3-6 (1-742) | MG3-4 (743-1134) | 10 |
| MG3-6 + MG3-7 | MG3-6 (1-742) | MG3-7 (751-1131) | 11 |
| MG3-6 + MG3-8 | MG3-6 (1-742) | MG3-8 (741-1132) | 12 |
| MG3-6 + MG4-2 | MG3-6 (1-742) | MG4-2 (747-1043) | 13 |
| MG3-6 + MG4-5 | MG3-6 (1-742) | MG4-5 (747-1055) | 14 |
| MG3-6 + MG6-3 | MG3-6 (1-742) | MG6-3 (709-1027) | 15 |
| MG3-6 + MG14-1 | MG3-6 (1-742) | MG14-1 (756-1003) | 16 |
| MG3-6 + MG15-1 | MG3-6 (1-742) | MG15-1 (729-1082) | 17 |
| MG3-6 + MG16-1 | MG3-6 (1-742) | MG16-1 (787-1154) | 18 |
| MG3-6 + MG16-2 | MG3-6 (1-742) | MG16-2 (796-1227) | 19 |
| MG3-6 + MG18-1 | MG3-6 (1-742) | MG18-1 (997-1348) | 20 |
| MG3-6 + MG21-1 | MG3-6 (1-742) | MG21-1 (740-1098) | 21 |
| MG3-6 + MG22-1 | MG3-6 (1-742) | MG22-1 (1092- | 22 |
| | | 1521) | |
| MG3-6 + MG23-1 | MG3-6 (1-742) | MG23-1 (1008- | 23 |
| | | 1377) | |
| MG3-6 + SaCas9 | MG3-6 (1-742) | SaCas9 (706-1053) | 24 |
| MG3-6 + SpCas9 | MG3-6 (1-742) | SpCas9 (988-1368) | 25 |
| MG29-1 + | MG29-1 (1-560) | MG29-5 (556-856) | 109 |
| MG29-5 (WP) | | | |
| MG3-6 + MG15-1 | MG3-6 (1-840) | MG15-1 (818-1082) | 26 |
| (WP) | | | |
| MG3-6 + MG15-1(P) | MG3-6 (1-922) | MG15-1 (931-1082) | 27 |
| MG29-1 + | MG29-1 (1-560) | MG57-1 (633-945) | 110 |
| MG57-1 (WP) | | | |

### Example 3—In Vitro PAM Enrichment Assay

[0384] The PAM sequences of nucleases utilized herein were determined via expression in either an E. coli lysate-based expression system or reconstituted in vitro translation. The E. coli codon optimized protein sequence was transcribed and translated from a PCR fragment under control of a T7 promoter. This mixture was diluted into a reaction buffer (10 mM Tris pH 7.5, 100 mM NaCl, 10 mM MgCl₂) with protein-specific sgRNA and a PAM plasmid library (PAM library U67/U40). The library of plasmids contained a spacer sequence matching that in the single guide followed by 8N mixed bases, a subset of which were presumed to have the correct PAM. After 1-3 hours, the reaction was stopped and the DNA was recovered via a DNA clean-up kit. The DNA was subjected to a blunt-end ligation reaction which added adapter sequences to cleaved library plasmids while leaving intact circular plasmids unchanged. A PCR was performed with primers (LA065 and LA125) specific to the library and the adapter sequence and resolved on a gel to identify active protein complexes (see FIG. 4 and FIG. 6). The resulting PCR products were further amplified by PCR using high throughput sequencing primers with a cycling parameter of 8. Samples subjected to NGS analysis were quantified and pooled together. The NGS library was purified and quantified. Sequencing this library, which was a subset of the starting 8N library, revealed the sequences which contain the correct PAM (see FIGS. 5A and 5B).

### Example 4—Single Guide Design for In Vivo Targeting

[0385] The single guide (sgRNA) structures used herein comprised a structure of: 5′—22nt protospacer-repeat-tracr—3′. 20 single guides targeting mouse albumin intron 1 were designed. In some instances, guides were chemically synthesized and included a chemical modification of the guide.

### Example 5—In Vitro Transcription of mRNA

[0386] The coding sequences (CDS) encoding the chimeras (e.g., MG3-6+MG3-4 (SEQ ID NO: 10)) were codon-optimized for mouse and chemically synthesized. The CDS were cloned into mRNA production vector pMG010. The architecture of pMG010 comprised the sequence of elements: T7 promotor-5′UTR-start codon-nuclear localization signal 1-CDS-nuclear localization signal 2-stop codon-3′ UTR-107 nucleotide polyA tail (SEQ ID NO: 108). A plasmid pMG010 containing the MG3-6+MG 3-4 CDS was purified from a 200 ml bacterial culture. The vector was digested with SapI overnight in order to linearize the plasmid downstream of the polyA tail. The linearized vector was purified using phenol/chloroform DNA extraction. In vitro transcription was carried out using T7 RNA polymerase at 50° C. for 1 hour. In vitro transcribed mRNA was treated with DNase for 10 minutes at 37° C., and the mRNA was purified. mRNA was quantified by absorbance at 260 nm and its size and purity was assessed by automated electrophoresis and demonstrated to be of the expected size.

### Example 6—Transfection of Hepa1-6 Cells and Albumin Targeting

[0387] 300 ng of mRNA and 350 ng of each single guide RNA (sgRNA) of SEQ ID NOs: 67-86 were co-transfected into Hepa1-6 cells as follows. One Day before transfection Hepa1-6 cells were seeded into 24 wells at a density to achieve 70% confluency 24 hours later. The following day MG3-6+MG3-4 chimera mRNA and a single guide were transfected into Hepa1-6 cells. Two days post transfection the media was aspirated, and genomic DNA was purified (see FIGS. 9A and 9B). The results indicate that the best performing sgRNAs were those designated g87 (SEQ ID NO:72) and g34 (SEQ ID NO: 70), with appreciable editing occurring also for gRNAs g45 (SEQ ID NO: 67), g44 (SEQ ID NO: 71), g59 (SEQ ID NO: 76), g78 (SEQ ID NO: 68), g84 (SEQ ID NO: 79), and g33 (SEQ ID NO: 80).

### Example 7—Sanger Sequencing of Genome Edited Samples

[0388] Primers flanking the regions of the genome targeted by the single guide RNAs (e.g., the albumin gene) were designed. PCR amplification using primers 57F (SEQ ID NO: 97) and 1072R (SEQ ID NO: 98) was performed resulting in a PCR product of 1016 bp. PCR products were purified and concentrated and 100 ng of PCR product subjected to Sanger sequencing using 8 pmoles of individual sequencing primers (132F, 282F, 446R, and 460F, SEQ ID NOs: 99-102). Sanger sequencing results were analyzed and data was plotted (see FIG. 9B).

### Example 8—MG3-6/3-4 Nuclease Guide Screen for Mouse HAO-1 Gene Using mRNA Transfection

[0389] Guide RNA for the MG3-6/3-4 nuclease targeting exons 1 to 4 of the mouse HAO-1 gene (encodes glycolate oxidase) were identified in silico by searching for the PAM sequence 3′ NNAAA(A/T)N 5′. A total of 23 guides with the fewest predicted off-target sites in the mouse genome were chemically synthesized as single guide RNAs. 300 ng mRNA and 120 ng single guide RNA were transfected into Hepa1-6 cells as follows. One day prior to transfection, Hepa1-6 cells that have been cultured for less than 10 days in DMEM, 10% FBS, 1×NEAA media, without Pen/Strep, were seeded into a TC-treated 24 well plate. Cells were counted, and the equivalent volume to 60,000 viable cells were added to each well. Additional pre-equilibrated media was added to each well to bring the total volume to 500 μL. On the day of transfection, 300 ng of the MG3-6-MG-3-4-encoding mRNA (SEQ ID NO: 108) and 120 ng of the sgRNA (scaffold sequence SEQ ID NO:34) were mixed together and transfected into the Hepa1-6 cells. Two days post transfection, the media was aspirated off of each well of Hepa1-6 cells and genomic DNA was purified by automated magnetic bead purification. The activity of the guides is summarized in Tables 2 and 3, while the primers used are summarized in Table 4.

TABLE 2
Average Activity of MG3-6/3-4 guides at mouse HAO1 delivered
by mRNA Transfection

| | | | | Editing |
|---|---|---|---|---|
| | | SEQ | | Activity |
| Guide | | ID | | (Average % |
| Name | PAM | NO: | Spacer Sequence | INDELs) |
| mH364-1 | GCAAATG | 611 | GTATGACTATTACAGGTCTGGG | 0 |
| mH364-2 | GAAAATG | 612 | AAATAGCAAAGTTTCTTACCTA | 0 |
| mH364-3 | AGAAAAT | 613 | TAAATAGCAAAGTTTCTTACCT | 0 |
| mH364-6 | CTAAAAC | 614 | ATTGGCATGCTGACTCTCTGTC | 0 |
| mH364-7 | AGAAAAG | 615 | GAGCTGGCCACTGTGCGAGGTA | 45.7 |
| mH364-9 | ACAAATA | 616 | CAGGTAAGGGGTGTCCACAGTC | 0 |
| mH364-10 | TGAAAAA | 617 | ATTCTATGTATCTATTCTAGGA | 0 |
| mH364-11 | GAAAAAC | 618 | TTCTATGTATCTATTCTAGGAT | 31 |
| mH364-15 | CCAAATC | 619 | AAATTTCCCTTAGGAGAAAATG | 0 |
| mH364-16 | GAAAATG | 620 | GTCTCCAAAATTTCCCTTAGGA | 10.7 |
| mH364-17 | AGAAAAT | 621 | TGTCTCCAAAATTTCCCTTAGG | 0 |
| mH364-18 | GGAAATT | 622 | TGATTTGGCATTTTCTCCTAAG | 0 |
| mH364-19 | CAAAATT | 623 | TCAGCAAGTCCACTGTTGTCTC | 0 |
| mH364-20 | CCAAAAT | 624 | TTCAGCAAGTCCACTGTTGTCT | 25.9 |
| mH364-22 | CAAAATG | 625 | AGTAGAGAAATGACAAACCTCT | 0 |
| mH364-23 | TCAAAAT | 626 | AAGTAGAGAAATGACAAACCTC | 20.7 |

TABLE 3
Results of testing MG3-6/3-4 guides with a more permissive PAM
design, at mouse HAO1 delivered by mRNA Transfection

| | | SEQ | | Editing | |
|---|---|---|---|---|---|
| Guide | | ID | | Activity | |
| Name | PAM | NO: | Spacer Sequence | (% INDELs) | R² |
| mH364-4 | AGAAACT | 627 | ACATCCAAGCATTTTCTAGGTA | 0 | 1 |
| mH364-5 | TAAAACA | 628 | TTGGCATGCTGACTCTCTGTCC | 0 | 1 |
| mH364-8 | ACAAAGA | 629 | CGCTGGATGCAACTGTACATCT | 0 | 0.99 |
| mH364-12 | AAAAACT | 630 | TCTATGTATCTATTCTAGGATG | 0 | 0.99 |
| mH364-13 | TGAAACC | 631 | TCTATTCTAGGATGAAAAACTT | 0 | 0.99 |
| mH364-14 | TCAAAGT | 632 | AGAAAATGCCAAATCATTGGTT | 0 | 0.99 |
| mH364-21 | GTAAAGG | 633 | ATTGACATCACTGCCTATTGTT | 0 | 1 |

TABLE 4
Primers designed for the mouse HAO1 gene, used for PCR at each
of the first four exons, and for sanger sequencing.

| | | | SEQ | |
|---|---|---|---|---|
| Target | | | ID | |
| Exon | Use | Primer Name | NO: | Primer Sequence |
| Mouse | Fwd PCR | PCR_mHE1_F_+233 | 634 | GTGACCAACCCTACCCGTTT |
| HAO1 | Rev PCR | PCR_mHE1_R_−553 | 635 | GCAAGCACCTACTGTCTCGT |
| Exon 1 | Sequencing | Seq_mHE1_F_+139 | 636 | GTCTAGGCATACAATGTTTGCTCA |
| Mouse | Fwd PCR | HAO1_E2_F5721 | 637 | CAACGAAGGTTCCCTCCAGG |
| HAO1 | Rev PCR | HAO1_E2_R6271 | 638 | GGAAGGGTGTTCGAGAAGGA |
| Exon 2 | Sequencing | 5938F Seq_HAO1_E2 | 639 | CTATGCAAGGAAAAGATTTGGCC |
| Mouse | Fwd PCR | HAO1_E3_F23198 | 640 | TGCCCTAGACAAGCTGACAC |
| HAO1 | Rev PCR | HAO1_E3_R23879 | 641 | CAGATTCTGGAAGTGGCCCA |
| Exon 3 | Sequencing | HAO1_E3_F23198 | 642 | Same as Fwd PCR Primer |
| Mouse | Fwd PCR | PCR_mHE4_F_+300 | 643 | GGCTGGCTGAAAATAGCATCC |
| HAO1 | Rev PCR | HAO1_E4_R31650 | 644 | AGGTTTGGTTCCCCTCACCT |
| Exon 4 | Sequencing | PCR_mHE4_R_−149 | 645 | TCTGCCATGAAGGCATATGGAC |

### Example 9—Guide Chemistry Optimization for the MG3-6/3-4 and MG3-6 Type II Nuclease

[0390] 40 different chemically modified guides (named mAlb3634-34-0 to mAlb3634-34-44) were designed and the activity of 39 of these guides was tested. One guide, mH3634-34-32, failed RNA synthesis, thus it was not tested. The guide spacer sequence chosen as a model to insert various chemical modifications was mAlb3634-34 (targeting albumin intron 1) as it proved to be the most active guide in a guide screen in the mouse hepatocyte cell line Hepa1-6 cells (Table 5 and FIG. 10).

TABLE 5
Activity of chemically modified guides in Hepa1-6 cells

| | Editing Activity |
|---|---|
| Guide | (% INDELs) |
| mAlb3634-13 | BLOD |
| mAlb3634-16 | BLOD |
| mAlb3634-19 | BLOD |
| mAlb3634-20 | BLOD |
| mAlb3634-24 | BLOD |
| mAlb3634-30 | BLOD |
| mAlb3634-45 | 19.5 |
| mAlb3634-44 | 16.5 |
| mAlb3634-53 | BLOD |
| mAlb3634-59 | 22 |
| mAlb3634-64 | BLOD |
| mAlb3634-72 | BLOD |
| mAlb3634-73 | BLOD |
| mAlb3634-74 | BLOD |
| mAlb3634-78 | 9 |
| mAlb3634-81 | 2 |
| mAlb3634-84 | 15 |
| mAlb3634-87 | 49 |
| mAlb3634-34 | 62 |
| mAlb3634-33 | 20.5 |

BLOD = below limit of detection

[0391] The sgRNA of MG3-6/3-4 comprises a spacer located at the 5′ end followed by the CRISPR repeat and the trans-activating CRISPR RNA (tracr). The CRISPR repeat and the tracr are identical to that of the MG3-6 nuclease (FIG. 11A, 11B). The CRISPR repeat and tracr form a structured RNA comprising 3 stem loops (FIG. 11A). Different areas of the stem loops were modified by replacing the 2′ hydroxyl of the ribose with methyl groups or replacing the phosphodiester backbone by a phosphorothioate (PS). Moreover, the spacer at the 5′ of the guide was modified with a mixture of 2′-O-methyl or 2′-fluorine bases and PS bonds. The different combinations of chemical modifications designed are called mAlb3634-34-0 to mAlb3634-34-44 and the respective sequences are shown in Table 6.

[0392] The editing activity of 39 single guides with the exact same base sequence but different chemical modifications was evaluated in Hepa1-6 cells by co-transfection of mRNA encoding MG3-6/3-4 and the guide; the editing activity is shown relative to the editing activity of guide control (AltR). The results are shown in Table 6 and FIG. 12.

TABLE 6
Sequences of chemically modified MG3-6/3-4 guides and their activity in
Hepa1-6 cells when co-transfected with MG3-6/3-4 mRNA

| | SEQ | | |
|---|---|---|---|
| | ID | | Activity |
| Guide | NO: | Sequence | % |
| mAlb3634-34-0 | 646 | rCrUrUrArGrGrUrCrArGrUrGrArArGrArGrArArGrArArGrUrUr | 71.8 |
| | | GrArGrArArUrCrGrArArArGrArUrUrCrUrUrArArUrArArGrGr | |
| | | CrArUrCrCrUrUrCrCrGrArUrGrCrUrGrArCrUrUrCrUrCrArCrC | |
| | | rGrUrCrCrGrUrUrUrUrCrCrArArUrArGrGrArGrCrGrGrGrCrGr | |
| | | GrUrArUrGrUrUrU | |
| mAlb3634-34-1 | 647 | mC*mU*mU*rArGrGrUrCrArGrUrGrArArGrArGrArArGrArAr | 124.5 |
| | | GrUrUrGrArGrArArUrCrGrArArArGrArUrUrCrUrUrArArUrAr | |
| | | ArGrGrCrArUrCrCrUrUrCrCrGrArUrGrCrUrGrArCrUrUrCrUrC | |
| | | rArCrCrGrUrCrCrGrUrUrUrUrCrCrArArUrArGrGrArGrCrGrGr | |
| | | GrCrGrGrUrArUrGrU*mU*mU*mU | |
| mAlb3634-34-2 | 648 | mC*mU*mU*rArGrGrUrCrArGrUrGrArArGrArGrArArGrArAr | 121.7 |
| | | GrUrUrGrArGrArArUrCrGrArArArGrArUrUrCrUrUrArArUrAr | |
| | | ArGrGrCrArUrCrCrUrUrCrCrGrArUrGrCrUrGrArCrUrUrCrUrC | |
| | | rArCrCrGrUrCrCrGrUrUrUrUrCrCrArArUrArGrGrArGrCrGrGr | |
| | | GrCrGrGrUrA*mU*mG*mU*mU*mU*mU | |
| mAlb3634-34-3 | 649 | mC*mU*mU*rArGrGrUrCrArGrUrGrArArGrArGrArArGrArAr | 120.5 |
| | | GrUrUrGrArGmAmAmUmCmGmAmAmAmGmAmUmUrCrUr | |
| | | UrArArUrArArGrGrCrArUrCrCrUrUrCrCrGrArUrGrCrUrGrArC | |
| | | rUrUrCrUrCrArCrCrGrUrCrCrGrUrUrUrUrCrCrArArUrArGrGr | |
| | | ArGrCrGrGrGrCrGrGrUrArUrGrU*mU*mU*mU | |
| mAlb3634-34-4 | 650 | mC*mU*mU*rArGrGrUrCrArGrUrGrArArGrArGrArArGrArAr | 63.3 |
| | | GrUrUrGrArG*mA*mA*mU*mC*mG*mA*mA*mA*mG*mA* | |
| | | mU*mUrCrUrUrArArUrArArGrGrCrArUrCrCrUrUrCrCrGrArUr | |
| | | GrCrUrGrArCrUrUrCrUrCrArCrCrGrUrCrCrGrUrUrUrUrCrCrA | |
| | | rArUrArGrGrArGrCrGrGrGrCrGrGrUrArUrGrU*mU*mU*mU | |
| mAlb3634-34-5 | 651 | mC*mU*mU*rArGrGrUrCrArGrUrGrArArGrArGrArArGrArAm | 0.8 |
| | | GmUmUmGmAmGmAmAmUmCmGmAmAmAmGmAmUmU | |
| | | mCmUmUmAmArUrArArGrGrCrArUrCrCrUrUrCrCrGrArUrGr | |
| | | CrUrGrArCrUrUrCrUrCrArCrCrGrUrCrCrGrUrUrUrUrCrCrArA | |
| | | rUrArGrGrArGrCrGrGrGrCrGrGrUrArUrGrU*mU*mU*mU | |
| mAlb3634-34-6 | 652 | mC*mU*mU*rArGrGrUrCrArGrUrGrArArGrArGrArArGrArAm | 0.0 |
| | | GmUmUmGmAmGmAmAmUmCrG*rA*rA*rA*mGmAmUmU | |
| | | mCmUmUmAmArUrArArGrGrCrArUrCrCrUrUrCrCrGrArUrGr | |
| | | CrUrGrArCrUrUrCrUrCrArCrCrGrUrCrCrGrUrUrUrUrCrCrArA | |
| | | rUrArGrGrArGrCrGrGrGrCrGrGrUrArUrGrU*mU*mU*mU | |
| mAlb3634-34-7 | 653 | mC*mU*mU*rArGrGrUrCrArGrUrGrArArGrArGrArArGrArAr | 113.0 |
| | | GrUrUrGrArGrArArUrCrGrArArArGrArUrUrCrUrUrArArUrAr | |
| | | AmGmGmCmAmUmCrCrUrUrCrCrGrArUrGrCrUrGrArCrUrUr | |
| | | CrUrCrArCrCrGrUrCrCrGrUrUrUrUrCrCrArArUrArGrGrArGrC | |
| | | rGrGrGrCrGrGrUrArUrGrU*mU*mU*mU | |
| mAlb3634-34-8 | 654 | mC*mU*mU*rArGrGrUrCrArGrUrGrArArGrArGrArArGrArAr | 115.6 |
| | | GrUrUrGrArGrArArUrCrGrArArArGrArUrUrCrUrUrArArUrAr | |
| | | AmGmGmCmAmUmCrC*rU*rU*rC*rC*rGrArUrGrCrUrGrArC | |
| | | rUrUrCrUrCrArCrCrGrUrCrCrGrUrUrUrUrCrCrArArUrArGrGr | |
| | | ArGrCrGrGrGrCrGrGrUrArUrGrU*mU*mU*mU | |
| mAlb3634-34-9 | 655 | mC*mU*mU*rArGrGrUrCrArGrUrGrArArGrArGrArArGrArAr | 105.0 |
| | | GrUrUrGrArGrArArUrCmGmAmAmArGrArUrUrCrUrUrArArU | |
| | | rArArGrGrCrArUrCmCmUmUmCmCrGrArUrGrCrUrGrArCrUr | |
| | | UrCrUrCrArCrCrGrUrCrCrGrUrUrUrUrCrCmAmAmUmArGrGr | |
| | | ArGrCrGrGrGrCrGrGrUrArUrGrU*mU*mU*mU | |
| mAlb3634-34-10 | 656 | mC*mU*mU*rArGrGrUrCrArGrUrGrArArGrArGrArArGrArAr | 101.6 |
| | | GrUrUrGrArGrArArUrCrG*rA*rA*rA*rGrArUrUrCrUrUrArAr | |
| | | UrArArGrGrCrArUrCrC*rU*rU*rC*rC*rGrArUrGrCrUrGrArCr | |
| | | UrUrCrUrCrArCrCrGrUrCrCrGrUrUrUrUrCrCrA*rA*rU*rA*rG | |
| | | rGrArGrCrGrGrGrCrGrGrUrArUrGrU*mU*mU*mU | |
| mAlb3634-34-11 | 657 | mC*mU*mU*rArGrGrUrCrArGrUrGrArArGrArGrArArGrArAr | 57.0 |
| | | GrUrUrGrArGrArArUrCrGrArArArGrArUrUrCrUrUrArArUrAr | |
| | | ArGrGrCrArUrCrCrUrUrCrCrGrArUrGrCrUrGrArCrUrUrCrUrC* | |
| | | mA*mC*mC*mG*mU*mC*mC*mG*mU*mU*mU*mU*mC* | |
| | | mC*mA*mA*mU*mArGrGrArGrCrGrGrGrCrGrGrUrA*mU*m | |
| | | G*mU*mU*mU*mU | |
| mAlb3634-34-12 | 658 | mC*mU*mU*rArGrGrUrCrArGrUrGrArArGrArGrArArGrArAm | 0.0 |
| | | GmUmUmGmAmGmAmAmUmCrG*rA*rA*rA*rGrArUrUrCrU | |
| | | rUrArArUrArArGrGrCrArUrCrCrUrUrCrCrGrArUrGrCrUrGrAr | |
| | | CrUrUrCrUrC*mA*mC*mC*mG*mU*mC*mC*mG*mU*mU* | |
| | | mU*mU*mC*mC*mA*mA*mU*mA*mG*mG*mA*mG*mC*m | |
| | | G*mG*mG*mC*mG*mG*mU*mA*mU*mG*mU*mU*mU*mU | |
| mAlb3634-34-13 | 659 | mC*mU*mU*rArGrGrUrCrArGrUrGrArArGrArGrArArGrArAm | 0.0 |
| | | GmUmUmGmAmGmAmAmUmCmGmAmAmAmGmAmUmU | |
| | | mCmUmUmAmArUrArArGrGrCrArUrCrCrUrUrCrCrGrArUrGr | |
| | | CrUrGrArCrUrUrCrUrCrArCrCrGrUrCrCrGrUrUrUrUrCrCrArA | |
| | | rUrArGrGrArGrCrGrGrGrCrGrGrUrArUrGrU*mU*mU*mU | |
| mAlb3634-34-14 | 670 | mC*mU*mU*rArGrGrUrCrArGrUrGrArArGrArGrArArGrArAr | 0.0 |
| | | GrUrUrGrArGmAmAmUmCmGmAmAmAmGmAmUmUrCrUr | |
| | | UrArArUrArArGrGrCrArUrCrCrUrUrCrCrGrArUrGrCrUrGrArC | |
| | | rUrUrCrUrC*mA*mC*mC*mG*mU*mC*mC*mG*mU*mU*m | |
| | | U*mU*mC*mC*mA*mA*mU*mA*mG*mG*mA*mG*mC*mG* | |
| | | mG*mG*mC*mG*mG*mU*mA*mU*mG*mU*mU*mU*mU | |
| mAlb3634-34-15 | 671 | mC*mU*mU*rArGrGrUrCrArGrUrGrArArGrArGrArArGrArAr | 34.5 |
| | | GrUrUrGrArGmAmAmUmCmGmAmAmAmGmAmUmUrCrUr | |
| | | UrArArUrArAmGmGmCmAmUmCrCrUrUrCrCrGrArUrGrCrUr | |
| | | GrArCrUrUrCmUmCmAmCmCmGmUmCmCmGmUmUmUmU | |
| | | mCmCmAmAmUmAmGmGmAmGmCmGmGmGmCmGmGmU | |
| | | mAmUmGmU*mU*mU*mU | |
| mAlb3634-34-19 | 672 | mC*mU*mU*rArGrGrUrCrArGrUrGrArArGrArGrArArGrArAr | 0.0 |
| | | GrUrUrGrArGrArArUrC*mG*mA*mA*mArGrArUrUrCrUrUrA | |
| | | rA*mU*mA*mArGrGrCrArUrC*mC*mU*mU*mC*mCrGrArUr | |
| | | GrCrU*mG*mA*mC*mU*mU*mC*mU*mCrArCrCrGrUrCrCr | |
| | | GrUrUrUrUrCrC*mA*mA*mU*mArGrGrArGrCrGrGrGrCrGrGr | |
| | | UrA*mU*mG*mU*mU*mU*mU | |
| mAlb3634-34-17 | 673 | mC*mU*mU*i2FAi2FGi2FGi2FUi2FCi2FAi2FGi2FUi2FGi2FAi | 147.7 |
| | | 2FAi2FGi2FAi2FGrArArGrArArGrUrUrGrArGrArArUrCrGrAr | |
| | | ArArGrArUrUrCrUrUrArArUrArArGrGrCrArUrCrCrUrUrCrCrG | |
| | | rArUrGrCrUrGrArCrUrUrCrUrCrArCrCrGrUrCrCrGrUrUrUrUr | |
| | | CrCrArArUrArGrGrArGrCrGrGrGrCrGrGrUrArUrGrU*mU*mU* | |
| | | mU | |
| mAlb3634-34-22 | 674 | mC*mU*mU*rArGrGrUrCrArGrUrGrArArGrArGrArArGrArAr | 44.2 |
| | | GrUrUrGrArGrArArUrCrG*rA*rA*rA*rGrArUrUrCrUrUrArAr | |
| | | UrArArGrGrCrArUrCrC*rU*U*rC*rC*rGrArUrGrCrUrGrArCr | |
| | | UrUrCrUrCmAmCmCmGmUmCmCmGmUmUmUmUmCmCrA* | |
| | | rA*rU*rA*mGmGmAmGmCmGmGmGmCmGmGmU*mA*m | |
| | | U*mG*mU*mU*mU*mU | |
| mAlb3634-34-23 | 675 | mC*mU*mU*rArGrGrUrCrArGrUrGrArArGrArGrArArGrArAr | 60.0 |
| | | GrUrUrGrArGrArArUrCrG*rA*rA*rA*rGrArUrUrCrUrUrArAr | |
| | | UrArArGrGrCrArUrCrC*rU*rU*rC*C*rGrArUrGrCrUrG*rA*r | |
| | | C*rU*rU*rC*U*rC*mAmCmCmGmUmCmCmGmUmUmUmU | |
| | | mCmCrA*rA*rU*rA*mGmGmAmGmCmGmGmGmCmGmGm | |
| | | U*mA*mU*mG*mU*mU*mU*mU | |
| mAlb3634-34-24 | 676 | mC*mU*mU*rArGrGrUrCrArGrUrGrArArGrArGrArArGrArAr | 77.4 |
| | | GrUrUrGrArGrArArUrCrG*rA*rA*rA*rGrArUrUrCrUrUrArAr | |
| | | UrArAmGmGmCmAmUmCrC*rU*rU*rC*rC*rGrArUrGrCrUrG | |
| | | rArCrUrUrCrUrCmAmCmCmGmUmCmCmGmUmUmUmUmC | |
| | | mCrA*rA*rU*rA*mGmGmAmGmCmGmGmGmCmGmGmU* | |
| | | mA*mU*mG*mU*mU*mU*mU | |
| mAlb3634-34-25 | 677 | mC*mU*mU*rArGrGrUrCrArGrUrGrArArGrArGrArArGrArAr | 50.5 |
| | | GrUrUrGrArGrArArUrCrG*rA*rA*rA*rGrArUrUrCrUrUrArAr | |
| | | UrArAmGmGmCmAmUmCrC*rU*rU*rC*rC*rGrArUrGrCrUrG* | |
| | | rA*rC*rU*rU*rC*rU*C*mAmCmCmGmUmCmCmGmUmUm | |
| | | UmUmCmCrA*rA*rU*rA*mGmGmAmGmCmGmGmGmCmG | |
| | | mGmU*mA*mU*mG*mU*mU*mU*mU | |
| mAlb3634-34-26 | 678 | mC*mU*mU*mA*rGrGrUrCrArGrUrGrArArGrArGrArArGrAr | 61.9 |
| | | ArGrUrUrGrArGrArArUrCrGrArArArGrArUrUrCrUrUrArArUr | |
| | | ArArGrGrCrArUrCrC*rU*rU*rC*rC*rGrArUrGrCrUrGrArCrUr | |
| | | UrCrUrCrArCrCrGrUrCrCrGrUrUrUrUrCrCrArArUrArGrGrArG | |
| | | rCrGrGrGrCrGrGrUrA*mU*mG*mU*mU*mU*mU | |
| mAlb3634-34-27 | 679 | mC*mU*mU*mA*rGrGrUrCrArGrUrGrArArGrArGrArArGrAr | 67.4 |
| | | ArGrUrUrGrArGrArArUrCrG*rA*rA*rA*rGrArUrUrCrUrUrAr | |
| | | ArUrArArGrGrCrArUrCrCrUrUrCrCrGrArUrGrCrUrGrArCrUrU | |
| | | rCrUrCmAmCmCmGmUmCmCmGmUmUmUmUmCmCrA*rA* | |
| | | rU*rA*rGrGrArGrCrGrGrGrCrGrGrUrA*mU*mG*mU*mU*m | |
| | | U*mU | |
| mAlb3634-34-29 | 680 | mC*i2FU*i2FU*i2FA*rGrGrUrCrArGrUrGrArArGrArGrArArGr | 114.4 |
| | | ArAmGmUmUmGmAmGmAmAmUmCrGrArArArGrArUrUrCr | |
| | | UrUrArArUrArArGrGrCrArUrCrCrUrUrCrCrGrArUrGrCrUrGrA | |
| | | rCrUrUrCrUrCrArCrCrGrUrCrCrGrUrUrUrUrCrCrArArUrArGr | |
| | | GrArGrCrGrGrGrCrGrGrUrA*mU*mG*mU*mU*mU*mU | |
| mAlb3634-34-30 | 681 | mC*i2FU*i2FU*i2FA*rGrGrUrCrArGrUrGrArArGrArGrArArGr | 113.9 |
| | | ArArGrUrUrGrArGrArArUrCrGrArArArGrArUrUrCrUrUrArAr | |
| | | UrArAmGmGmCmAmUmCrCrUrUrCrCrGrArUrGrCrUrGrArCr | |
| | | UrUrCrUrCrArCrCrGrUrCrCrGrUrUrUrUrCrCrArArUrArGrGrA | |
| | | rGrCrGrGrGrCrGrGrUrA*mU*mG*mU*mU*mU*mU | |
| mAlb3634-34-31 | 682 | mC*i2FU*i2FU*i2FA*rGrGrUrCrArGrUrGrArArGrArGrArArGr | 100.0 |
| | | ArArGrUrUrGrArGrArArUrCrGrArArArGrArUrUrCrUrUrArAr | |
| | | UrArArGrGrCrArUrCrCrUrUrCrCrGrArUrGrCrUrGrArCrUrUrC | |
| | | rUrCmAmCmCmGmUmCmCmGmUmUmUmUmCmCrArArUr | |
| | | ArGrGrArGrCrGrGrGrCrGrGrUrA*mU*mG*mU*mU*mU*mU | |
| mAlb3634-34-32 | 683 | mC*mU*mU*i2FA*i2FGi2FGi2FUi2FCi2FAi2FGi2FUi2FGi2F | NT |
| | | Ai2FAi2FGi2FAi2FGrArArGrArAmGmUmUmGmAmGmAmA | |
| | | mUmCrG*rA*rA*rA*mGmAmUmUrCrUrUrArArUrArAmGmG | |
| | | mCmAmUmCrC*rU*rU*rC*rC*rGrArUrGrCrUrGrArCrUrUrCr | |
| | | UrCmAmCmCmGmUmCmCmGmUmUmUmUmCmCrA*rA*rU* | |
| | | rA*mGmGmAmGmCmGmGmGmCmGmGmUmA*mU*mG*m | |
| | | U*mU*mU*mU | |
| mAlb3634-34-33 | 684 | mC*mU*mU*i2FA*i2FGi2FGi2FUi2FCi2FAi2FGi2FUi2FGi2F | 0.0 |
| | | Ai2FAi2FGi2FAi2FGrArArGrArAmGmUmUmGmAmGmAmA | |
| | | mUmCrG*rA*rA*rA*mGmAmUmUrCrUrUrArArUrArAmGmG | |
| | | mCmAmUmCrC*rU*U*rC*rC*rGrArUrGrCrUrGrArCrUrUrCr | |
| | | UrCrArCrCrGrUrCrCrGrUrUrUrUrCrCrA*A*U*rA*rGrGrArG | |
| | | rCrGrGrGrCrGrGrUrA*mU*mG*mU*mU*mU*mU | |
| mAlb3634-34-34 | 685 | mC*mU*mU*mA*i2FGi2FGi2FUi2FCi2FAi2FGi2FUi2FGi2FAi | 68.9 |
| | | 2FAi2FGi2FAi2FGrArArGrArArGrUrUrGrArGrArArUrCrG*rA* | |
| | | A*rA*rGrArUrUrCrUrUrArArUrArArGrGrCrArUrCrC*rU*rU* | |
| | | rC*rC*rGrArUrGrCrUrGrArCrUrUrCrUrCrArCrCrGrUrCrCrGr | |
| | | UrUrUrUrCrCrA*rA*rU*rA*rGrGrArGrCrGrGrGrCrGrGrUrA* | |
| | | mU*mG*mU*mU*mU*mU | |
| mAlb3634-34-35 | 686 | mC*mU*mU*mA*rGrGrUrCrArGrUrGrArArGrArGrArArGrAr | 65.0 |
| | | ArGrUrUrGrArGrArArUrCmG*mA*mA*mA*rGrArUrUrCrUrU | |
| | | rArArUrArArGrGrCrArUrCmC*mU*mU*mC*mC*rGrArUrGrC | |
| | | rUrGrArCrUrUrCrUrCrArCrCrGrUrCrCrGrUrUrUrUrCrCmA*m | |
| | | A*mU*mA*rGrGrArGrCrGrGrGrCrGrGrUrA*mU*mG*mU*m | |
| | | U*mU*mU | |
| mAlb3634-34-36 | 687 | mC*mU*mU*mA*rGrGrUrCrArGrUrGrArArGrArGrArArGrAr | 0.0 |
| | | AmGmUmUmGmAmGmAmAmUmCrG*rA*rA*rA*rGrArUrUr | |
| | | CrUrUrArArUrArAmGmGmCmAmUmCrC*rU*rU*rC*rC*rGrA | |
| | | rUrGrCrUrGrArCrUrUrCrUrCrArCrCrGrUrCrCrGrUrUrUrUrCr | |
| | | CrA*rA*rU*rA*rGrGrArGrCrGrGrGrCrGrGrUrA*mU*mG*mU* | |
| | | mU*mU*mU | |
| mAlb3634-34-37 | 688 | mC*mU*mU*mA*rGrGrUrCrArGrUrGrArArGrArGrArArGrAr | 0.0 |
| | | AmGmUmUmGmAmGmAmAmUmCrG*rA*rA*rA*rGrArUrUr | |
| | | CrUrUrArArUrArAmGmGmCmAmUmCrC*rU*rU*rC*rC*rGrA | |
| | | rUrGrCrUrGrArCrUrUrCrUrCmAmCmCmGmUmCmCmGmUm | |
| | | UmUmUmCmCrA*rA*rU*rA*rGrGrArGrCrGrGrGrCrGrGrUrA* | |
| | | mU*mG*mU*mU*mU*mU | |
| mAlb3634-34-38 | 689 | mC*mU*mU*mA*rGrGrUrCrArGrUrGrArArGrArGrArArGrAr | 0.0 |
| | | AmGmUmUmGmAmGmAmAmUmCrG*rA*rA*rA*rGrArUrUr | |
| | | CrUrUrArArUrArAmGmGmCmAmUmCrC*rU*rU*rC*rC*rGrA | |
| | | rUrGrCrUrGrArCrUrUrCrUrCrArCrCmGmUmCmCmGmUmUm | |
| | | UmUmCmCrA*rA*rU*rA*mGmGmAmGmCmGmGmGmCmGr | |
| | | GrUrA*mU*mG*mU*mU*mU*mU | |
| mAlb3634-34-39 | 690 | mC*mU*mU*mA*rGrGrUrCrArGrUrGrArArGrArGrArArGrAr | 3.7 |
| | | ArGrUrUrGrArGmAmAmUmCrG*rA*rA*rA*rGrArUrUrCrUrU | |
| | | rArArUrArArGrGrCrArUrCrC*rU*rU*rC*rC*rGrArUrGrCrUrG* | |
| | | rA*rC*rU*rU*rC*rU*rC*rArCrCrGrUrCrCrGrUrUrUrUrCrCrA* | |
| | | rA*rU*rA*rGrGrArGrCrGrGrGrCrGrGrUrA*mU*mG*mU*mU* | |
| | | mU*mU | |
| mAlb3634-34-40 | 691 | mC*mU*mU*mA*rGrGrUrCrArGrUrGrArArGrArGrArArGrAr | 0.0 |
| | | ArGrUrUrGrArGmAmAmUmCrG*rA*rA*rA*mGmAmUmUrCr | |
| | | UrUrArArUmAmAmGmGmCmAmUmCrC*rU*rU*rC*rC*mGm | |
| | | AmUmGmCrU*rG*rA*mCmUmUrCrUrCrArCrCrGrUrCrCrGrU | |
| | | rUrUrUrCrCrA*rA*rU*rA*rGrGrArGrCrGrGrGrCrGrGrUrA*m | |
| | | U*mG*mU*mU*mU*mU | |
| mAlb3634-34-41 | 692 | mC*mU*mU*mA*rGrGrUrCrArGrUrGrArArGrArGrArArGrAr | 47.1 |
| | | ArGrUrUrGrArGmAmAmUmCrG*rA*rA*rA*rGrArUrUrCrUrU | |
| | | rArArUrArAmGmGmCmAmUmCrC*rU*rU*rC*rC*rGrArUrGr | |
| | | CrUrGrArCrUrUrCrUrCmAmCmCmGmUmCmCmGmUmUmU | |
| | | mUmCmCrA*rA*rU*rA*rGrGrArGrCrGrGrGrCrGrGrUrA*mU* | |
| | | mG*mU*mU*mU*mU | |
| mAlb3634-34-42 | 693 | mC*mU*mU*mA*i2FGi2FGi2FUi2FCi2FAi2FGi2FUi2FGi2FAi | 66.7 |
| | | 2FAi2FGi2FAi2FGi2FAi2FAi2FGi2FArArGrUrUrGrArGrArArU | |
| | | rCrG*rA*rA*rA*rGrArUrUrCrUrUrArArUrArArGrGrCrArUrCr | |
| | | C*rU*rU*rC*rC*rGrArUrGrCrUrGrArCrUrUrCrUrCrArCrCrGr | |
| | | UrCrCrGrUrUrUrUrCrCrA*rA*rU*rA*rGrGrArGrCrGrGrGrCrG | |
| | | rGrUrA*mU*mG*mU*mU*mU*mU | |
| mAlb3634-34-43 | 694 | mC*mU*mU*rArGrGrUrCrArGrUrGrArArGrArGrArArGrArAr | 73.8 |
| | | GrUrUrGrArGrArArUrCrGrArArArGrArUrUrCrUrUrArArUrAr | |
| | | ArGrGrCrArUrCrCrUrUrCrCrGrArUrGrCrUrGrArCrUrUrCrUrC | |
| | | rArCrCrGrUrCrCrGrUrUrUrUrCrCrArArUrAmGmGmAmGmC | |
| | | mGmGmGmCmGmGmUmA*mU*mG*mU*mU*mU*mU | |
| mAlb3634-34-44 | 695 | mC*mU*mU*rArGrGrUrCrArGrUrGrArArGrArGrArArGrArAr | 84.9 |
| | | GrUrUrGrArGrArArUrCrGrArArArGrArUrUrCrUrUrArArUrAr | |
| | | ArGrGrCrArUrCrCrUrUrCrCrGrArUrGrCrUrGrArCrUrUrCrUrC | |
| | | mAmCmCmGmUmCmCmGmUmUmUmUmCmCrArArUrArGr | |
| | | GrArGrCrGrGrGrCrGrGrUrA*mU*mG*mU*mU*mU*mU | |

(r = native ribose base, m = 2′-O methyl modified base, F = 2′ Fluro modified base,
* = phosphorothioate bond)

[0393] A guide with the same base sequence and an alternative chemical modification (AltR1/AltR2) was used as a control. The spacer sequence in these guides targets a 22-nucleotide region in albumin intron 1 of the mouse genome. Guide mAlb3634-34-0 (no chemical modifications) showed 72% activity relative to the AltR1/AltR2 guide. Guide mAlb3634-34-1 showed 124% activity relative to the AltR1/AltR2 guide, showing the importance of stability of guides for editing: mAlb3634-34-1 is more stable than mAlb3634-34-0 (FIG. 13 and FIG. 14). Importantly, mAlb3634-34-17 retained 147% of the activity relative to AltR1/AltR2. The incorporation of 2′-O-fluorines in the spacer greatly increased the stability of mAlb3634-34-35, and the guide retained 65% activity. mAlb3634-34-35 contains 2′-O-methyl and PS bonds in the loops of the three stem loops of the MG3-6/3-4 guide. Importantly, mAlb3634-34-42 retained 66% of activity and this guide contains as many fluorines in the spacer as mAlb3634-34-17, but it also contains PS bonds in all the loops present in the gRNA. mAlb3634-34-27 retained 67% activity and mAlb3634-34-29 retained 114% activity. Among the modifications these guides contain are PS bonds in the loop of the first stem loop and 2′-O-methyl groups in the first strand of the first stem loop for mAlb3634-34-27 and mAlb3634-34-29, respectively. When these 2 modifications were combined (2′-O-methyl in the first strand of the first stem loop and PS bonds in the loop of the first stem loop), the guides lost their activity (mAlb3634-34-33, mAlb3634-34-36, mAlb3634-34-38), showing the complexity of the gRNA/protein interaction and demonstrating that the results of simple extrapolations are difficult to predict.

[0394] In order to test the stability of these chemically modified guides compared to the guide with no chemical modification (native RNA), a stability assay using crude cell extracts was used. Crude cell extracts from mammalian cells were selected because they contain the mixture of nucleases that a guide RNA will be exposed to when delivered to mammalian cells in vitro or in vivo. Hepa1-6 cells were collected by adding 3 mL of cold PBS per 15 cm dish of confluent cells and releasing the cells from the surface of the dish using a cell scraper. The cells were pelleted at 200 g for 10 minutes and frozen at −80° C. for future use. For the stability assays, cells were resuspended in 4 volumes of cold PBS (e.g., for a 100 mg pellet, cells were resuspended in 400 μL of cold PBS). Triton X-100 was added to a concentration of 0.2% (v/v), cells were vortexed for 10 seconds, put on ice for 10 minutes, and vortexed again for 10 seconds. Triton X-100 is a mild non-ionic detergent that disrupts cell membranes but does not inactivate or denature proteins at the concentration used. Stability reactions were set up on ice and comprised 20 μl of cell crude extract with 2 pmoles of each guide (1 μL of a 2 μM stock). Six reactions were set up per guide comprising: input, 0.5 hour, 1 hour, 4 hours, 9 hours, and in some cases 21 hours (The time in hours referring to the length of time each sample was incubated). Samples were incubated at 37° C. from 0.5 hours up to 21 hours while the input control was left on ice for 5 minutes. After each incubation period, the reaction was stopped by adding 300 μL of a mixture of phenol and guanidine thiocyanate (Tri Reagent), which immediately denatures all proteins and efficiently inhibits ribonucleases and facilitates the subsequent recovery of RNA. After adding Tri Reagent, the samples were vortexed for 15 seconds and stored at −20° C. RNA was extracted from the samples and eluted in 100 μL of nuclease-free water. Detection of the modified guide was performed, and primers and probes were designed to specifically detect the sequence in the mAlb3634-34 sgRNA, which is the same for all of the guides. Data was plotted as a function of percentage of sgRNA remaining in relation to the input sample (Tables 7 and 8; FIG. 13 and FIG. 14).

TABLE 7
Stability of MG3-6/3-4 chemically modified guides
over 9 hours at 37° C.

| | Percentage (%) guide left | | | |
|---|---|---|---|---|
| Time | mAlb3634- | mAlb3634- | mAlb3634- | mAlb3634- |
| (H) | 34-0 | 34-1 | 34-17 | 34-29 |
| 0.5 | 48.6 | 71.6 | 84.9 | 91.3 |
| 1 | 45.5 | 111.3 | 69.2 | 79.8 |
| 4 | 8.3 | 84.3 | 46.6 | 58.2 |
| 9 | 1.2 | 41.3 | 36.6 | 16.5 |
| Time | mAlb3634- | mAlb3634- | mAlb3634- | mAlb3634- |
| (H) | 34-30 | 34-35 | 34-36 | 34-42 |
| 0.5 | 86.7 | ND | 91.7 | 91.7 |
| 1 | 90.1 | 146.4 | 57.8 | 72.1 |
| 4 | 53.5 | 128.3 | 61.9 | 72.1 |
| 9 | 21.9 | 100 | 62.6 | 47.3 |

TABLE 8
Stability of MG3-6/3-4 chemically modified guides
over 21 hours at 37° C.

| | Percentage guide left | | | |
|---|---|---|---|---|
| Time | mAlb3634- | mAlb3634- | mAlb3634- | mAlb3634- |
| (H) | 34-0 | 34-1 | 34-35 | 34-42 |
| 0.5 | 68.3 | 61.9 | 104.6 | 80.9 |
| 1 | 51.0 | 59.6 | 84.0 | 73.2 |
| 4 | 9.6 | 51.0 | 52.6 | 70.7 |
| 9 | 1.7 | 40.4 | 51.2 | 45.3 |
| 21 | 0.03 | 1.4 | 24.8 | 15.6 |

[0395] The stability assays showed that introducing three 2′-O-methyls and three PS bonds in the 5′ and 3′ end of the guides significantly improved stability (FIG. 13 and FIG. 14). Adding extra 2′-fluors to the 5′ and 3′ modifications, as in mAlb3634-17 and mAlb3634-42, did not show an apparent advantage at early time points (up to 9 hours) as shown in FIG. 13, but a slight improvement in stability was apparent when the stability assays were run for 21 hours (FIG. 14). Including 2-O-methyl and PS bonds in all the loops of the stem loops (mAlb3634-35) gave an apparent larger increment in stability compared to the guide with chemical modifications on the 5′ and 3′ ends (mAlb3634-1), as seen in FIG. 13. However, when these results were repeated and at longer time points, this increment became less apparent at earlier time points and was became apparent at longer time points up to 21 hours, as seen in FIG. 14. Including 2′-O-methyl in the first strand of distinct stem loops did not provide an advantage in stability for up to 9 hours, as shown by comparing mAlb3634-0 and mAlb3634-29 and mAlb3634-30. mAlb3634-36, which has a combination of 2′-O-methyl in the first strand of all stem loops and PS bonds in the loops of all stem loops, showed an apparent increased stability at 9 hr when compared to end modified guide (mAlb3634-0). However, this guide was not active when tested via mRNA transfection in Hepa1-6 cells. In general, adding extra modifications (e.g., 2′-O-methyl, 2′-O-fluor or PS bonds) to the end modified guide did not confer a large advantage in stability at earlier time points up to 9 hours (FIG. 13), and a small increase in stability was apparent at longer time points (FIG. 14). The large size (110 nt) and highly structured nature of this gRNA may make it inherently more stable than shorter or less structured guide RNA and thereby limit the benefit of chemical modifications on stability. Modifying the 5′ and 3′ ends of the guide appears to provide a good level of protection against nucleases. However adding the extra modifications in the guides might provide more benefit in vivo, as these types of modifications may reduce immunogenicity.

### Example 10—Protein Recombination of Type V-A Nucleases

[0396] To expand the capability of rapid PAM exchange beyond type II nucleases, three type V-A nucleases were chosen for protein recombination. The breakpoint was chosen based on the predicted structural information (Table 1B). Similar to type II enzyme recombinants, the type V chimera showed activity when proteins were recombined from a closely related family. In vitro PAM enrichment and NGS analysis revealed a consistent result that the PAM of a chimera is inherited from C-terminal parent. It may be possible to avoid potential structural disruptions of protein recombination from distantly related families by utilizing breakpoint optimization (FIGS. 15A-15B).

### Example 11—Analysis of Gene-Editing Outcomes at the DNA Level for TRAC in HEK293T Cells

[0397] Nucleofection of MG3-6/4 RNPs (104 pmol protein/300 pmol guide) comprising sgRNAs described below in Table 9A and SEQ ID NOs: 119-158 was performed into HEK293T cells (200,000 cells/well) by electroporation. Three days post-transfection, cells were harvested and genomic DNA was prepared. PCR primers appropriate for use in NGS-based DNA sequencing were generated, optimized, and used to amplify the individual target sequences for each guide RNA. The amplicons were sequenced and analyzed to determine gene editing (FIG. 16). The results show that sgRNAs C1, F2, and B3 were most effective at inducing indels, with appreciable editing also occurring for sgRNAs D2, H2, A3, and C3.

TABLE 9A
gRNAs and Targeting Sequences Used in Example 11

| | SEQ | | |
|---|---|---|---|
| | ID | | |
| Category | NO: | Name | Sequence |
| MG3-6/3- | 119 | MG3- | mG*mC*mC*rGrUrGrUrArCrCrArGrCrUrGrArGrArGrArCrUrGrUrU |
| 4 sgRNA | | 6/3-4 | rGrArGrArArUrCrGrArArArGrArUrUrCrUrUrArArUrArArGrGrCr |
| targeting | | TRAC | ArUrCrCrUrUrCrCrGrArUrGrCrUrGrArCrUrUrCrUrCrArCrCrGrU |
| TRAC | | A1 | rCrCrGrUrUrUrUrCrCrArArUrArGrGrArGrCrGrGrGrCrGrGrUrAr |
| | | | UrGrU*mU*mU*mU |
| MG3-6/3- | 120 | MG3- | mA*mU*mU*rCrArCrCrGrArUrUrUrUrGrArUrUrCrUrCrArArGrUrU |
| 4 sgRNA | | 6/3-4 | rGrArGrArArUrCrGrArArArGrArUrUrCrUrUrArArUrArArGrGrCr |
| targeting | | TRAC | ArUrCrCrUrUrCrCrGrArUrGrCrUrGrArCrUrUrCrUrCrArCrCrGrU |
| TRAC | | B1 | rCrCrGrUrUrUrUrCrCrArArUrArGrGrArGrCrGrGrGrCrGrGrUrAr |
| | | | UrGrU*mU*mU*mU |
| MG3-6/3- | 121 | MG3- | mG*mA*mU*rUrCrUrGrArUrGrUrGrUrArUrArUrCrArCrArGrGrUrU |
| 4 sgRNA | | 6/3-4 | rGrArGrArArUrCrGrArArArGrArUrUrCrUrUrArArUrArArGrGrCr |
| targeting | | TRAC | ArUrCrCrUrUrCrCrGrArUrGrCrUrGrArCrUrUrCrUrCrArCrCrGrU |
| TRAC | | C1 | rCrCrGrUrUrUrUrCrCrArArUrArGrGrArGrCrGrGrGrCrGrGrUrAr |
| | | | UrGrU*mU*mU*mU |
| MG3-6/3- | 122 | MG3- | mA*mA*mC*rArGrUrGrCrUrGrUrGrGrCrCrUrGrGrArGrCrArGrUrU |
| 4 sgRNA | | 6/3-4 | rGrArGrArArUrCrGrArArArGrArUrUrCrUrUrArArUrArArGrGrCr |
| targeting | | TRAC | ArUrCrCrUrUrCrCrGrArUrGrCrUrGrArCrUrUrCrUrCrArCrCrGrU |
| TRAC | | D1 | rCrCrGrUrUrUrUrCrCrArArUrArGrGrArGrCrGrGrGrCrGrGrUrAr |
| | | | UrGrU*mU*mU*mU |
| MG3-6/3- | 123 | MG3- | mG*mG*mC*rUrGrGrGrGrArArGrArArGrGrUrGrUrCrUrUrCrGrUrU |
| 4 sgRNA | | 6/3-4 | rGrArGrArArUrCrGrArArArGrArUrUrCrUrUrArArUrArArGrGrCr |
| targeting | | TRAC | ArUrCrCrUrUrCrCrGrArUrGrCrUrGrArCrUrUrCrUrCrArCrCrGrU |
| TRAC | | E1 | rCrCrGrUrUrUrUrCrCrArArUrArGrGrArGrCrGrGrGrCrGrGrUrAr |
| | | | UrGrU*mU*mU*mU |
| MG3-6/3- | 124 | MG3- | mG*mU*mU*rUrUrGrUrCrUrGrUrGrArUrArUrArCrArCrArUrGrUrU |
| 4 sgRNA | | 6/3-4 | rGrArGrArArUrCrGrArArArGrArUrUrCrUrUrArArUrArArGrGrCr |
| targeting | | TRAC | ArUrCrCrUrUrCrCrGrArUrGrCrUrGrArCrUrUrCrUrCrArCrCrGrU |
| TRAC | | F1 | rCrCrGrUrUrUrUrCrCrArArUrArGrGrArGrCrGrGrGrCrGrGrUrAr |
| | | | UrGrU*mU*mU*mU |
| MG3-6/3- | 125 | MG3- | mU*mU*mA*rCrUrUrUrGrUrGrArCrArCrArUrUrUrGrUrUrUrGrUrU |
| 4 sgRNA | | 6/3-4 | rGrArGrArArUrCrGrArArArGrArUrUrCrUrUrArArUrArArGrGrCr |
| targeting | | TRAC | ArUrCrCrUrUrCrCrGrArUrGrCrUrGrArCrUrUrCrUrCrArCrCrGrU |
| TRAC | | G1 | rCrCrGrUrUrUrUrCrCrArArUrArGrGrArGrCrGrGrGrCrGrGrUrAr |
| | | | UrGrU*mU*mU*mU |
| MG3-6/3- | 126 | MG3- | mU*mU*mG*rUrGrArCrArCrArUrUrUrGrUrUrUrGrArGrArArGrUrU |
| 4 sgRNA | | 6/3-4 | rGrArGrArArUrCrGrArArArGrArUrUrCrUrUrArArUrArArGrGrCr |
| targeting | | TRAC | ArUrCrCrUrUrCrCrGrArUrGrCrUrGrArCrUrUrCrUrCrArCrCrGrU |
| TRAC | | H1 | rCrCrGrUrUrUrUrCrCrArArUrArGrGrArGrCrGrGrGrCrGrGrUrAr |
| | | | UrGrU*mU*mU*mU |
| MG3-6/3- | 127 | MG3- | mU*mG*mU*rGrArCrArCrArUrUrUrGrUrUrUrGrArGrArArUrGrUrU |
| 4 sgRNA | | 6/3-4 | rGrArGrArArUrCrGrArArArGrArUrUrCrUrUrArArUrArArGrGrCr |
| targeting | | TRAC | ArUrCrCrUrUrCrCrGrArUrGrCrUrGrArCrUrUrCrUrCrArCrCrGrU |
| TRAC | | A2 | rCrCrGrUrUrUrUrCrCrArArUrArGrGrArGrCrGrGrGrCrGrGrUrAr |
| | | | UrGrU*mU*mU*mU |
| MG3-6/3- | 128 | MG3- | mA*mU*mU*rUrGrUrUrUrGrArGrArArUrCrArArArArUrCrGrGrUrU |
| 4 sgRNA | | 6/3-4 | rGrArGrArArUrCrGrArArArGrArUrUrCrUrUrArArUrArArGrGrCr |
| targeting | | TRAC | ArUrCrCrUrUrCrCrGrArUrGrCrUrGrArCrUrUrCrUrCrArCrCrGrU |
| TRAC | | B2 | rCrCrGrUrUrUrUrCrCrArArUrArGrGrArGrCrGrGrGrCrGrGrUrAr |
| | | | UrGrU*mU*mU*mU |
| MG3-6/3- | 129 | MG3- | mU*mU*mC*rCrUrGrUrGrArUrGrUrCrArArGrCrUrGrGrUrCrGrUrU |
| 4 sgRNA | | 6/3-4 | rGrArGrArArUrCrGrArArArGrArUrUrCrUrUrArArUrArArGrGrCr |
| targeting | | TRAC | ArUrCrCrUrUrCrCrGrArUrGrCrUrGrArCrUrUrCrUrCrArCrCrGrU |
| TRAC | | C2 | rCrCrGrUrUrUrUrCrCrArArUrArGrGrArGrCrGrGrGrCrGrGrUrAr |
| | | | UrGrU*mU*mU*mU |
| MG3-6/3- | 130 | MG3- | mU*mC*mC*rUrGrUrGrArUrGrUrCrArArGrCrUrGrGrUrCrGrGrUrU |
| 4 sgRNA | | 6/3-4 | rGrArGrArArUrCrGrArArArGrArUrUrCrUrUrArArUrArArGrGrCr |
| targeting | | TRAC | ArUrCrCrUrUrCrCrGrArUrGrCrUrGrArCrUrUrCrUrCrArCrCrGrU |
| TRAC | | D2 | rCrCrGrUrUrUrUrCrCrArArUrArGrGrArGrCrGrGrGrCrGrGrUrAr |
| | | | UrGrU*mU*mU*mU |
| MG3-6/3- | 131 | MG3- | mG*mUmC*rArArGrCrUrGrGrUrCrGrArGrArArArArGrCrUrGrUrU |
| 4 sgRNA | | 6/3-4 | rGrArGrArArUrCrGrArArArGrArUrUrCrUrUrArArUrArArGrGrCr |
| targeting | | TRAC | ArUrCrCrUrUrCrCrGrArUrGrCrUrGrArCrUrUrCrUrCrArCrCrGrU |
| TRAC | | E2 | rCrCrGrUrUrUrUrCrCrArArUrArGrGrArGrCrGrGrGrCrGrGrUrAr |
| | | | UrGrU*mU*mU*mU |
| MG3-6/3- | 132 | MG3- | mA*mG*mC*rUrUrGrArCrArUrCrArCrArGrGrArArCrUrUrUrGrUrU |
| 4 sgRNA | | 6/3-4 | rGrArGrArArUrCrGrArArArGrArUrUrCrUrUrArArUrArArGrGrCr |
| targeting | | TRAC | ArUrCrCrUrUrCrCrGrArUrGrCrUrGrArCrUrUrCrUrCrArCrCrGrU |
| TRAC | | F2 | rCrCrGrUrUrUrUrCrCrArArUrArGrGrArGrCrGrGrGrCrGrGrUrAr |
| | | | UrGrU*mU*mU*mU |
| MG3-6/3- | 133 | MG3- | mG*mA*mC*rArUrCrArCrArGrGrArArCrUrUrUrCrUrArArArGrUrU |
| 4 sgRNA | | 6/3-4 | rGrArGrArArUrCrGrArArArGrArUrUrCrUrUrArArUrArArGrGrCr |
| targeting | | TRAC | ArUrCrCrUrUrCrCrGrArUrGrCrUrGrArCrUrUrCrUrCrArCrCrGrU |
| TRAC | | G2 | rCrCrGrUrUrUrUrCrCrArArUrArGrGrArGrCrGrGrGrCrGrGrUrAr |
| | | | UrGrU*mU*mU*mU |
| MG3-6/3- | 134 | MG3- | mUmU*mA*rCrArGrArUrArCrGrArArCrCrUrArArArCrUrUrGrUrU |
| 4 sgRNA | | 6/3-4 | rGrArGrArArUrCrGrArArArGrArUrUrCrUrUrArArUrArArGrGrCr |
| targeting | | TRAC | ArUrCrCrUrUrCrCrGrArUrGrCrUrGrArCrUrUrCrUrCrArCrCrGrU |
| TRAC | | H2 | rCrCrGrUrUrUrUrCrCrArArUrArGrGrArGrCrGrGrGrCrGrGrUrAr |
| | | | UrGrU*mU*mU*mU |
| MG3-6/3- | 135 | MG3- | mA*mA*mA*rArCrCrUrGrUrCrArGrUrGrArUrUrGrGrGrUrUrGrUrU |
| 4 sgRNA | | 6/3-4 | rGrArGrArArUrCrGrArArArGrArUrUrCrUrUrArArUrArArGrGrCr |
| targeting | | TRAC | ArUrCrCrUrUrCrCrGrArUrGrCrUrGrArCrUrUrCrUrCrArCrCrGrU |
| TRAC | | A3 | rCrCrGrUrUrUrUrCrCrArArUrArGrGrArGrCrGrGrGrCrGrGrUrAr |
| | | | UrGrU*mU*mU*mU |
| MG3-6/3- | 136 | MG3- | mG*mA*mU*rUrGrGrGrUrUrCrCrGrArArUrCrCrUrCrCrUrCrGrUrU |
| 4 sgRNA | | 6/3-4 | rGrArGrArArUrCrGrArArArGrArUrUrCrUrUrArArUrArArGrGrCr |
| targeting | | TRAC | ArUrCrCrUrUrCrCrGrArUrGrCrUrGrArCrUrUrCrUrCrArCrCrGrU |
| TRAC | | B3 | rCrCrGrUrUrUrUrCrCrArArUrArGrGrArGrCrGrGrGrCrGrGrUrAr |
| | | | UrGrU*mU*mU*mU |
| MG3-6/3- | 137 | MG3- | mG*mG*mA*rArCrCrCrArArUrCrArCrUrGrArCrArGrGrUrUrGrUrU |
| 4 sgRNA | | 6/3-4 | rGrArGrArArUrCrGrArArArGrArUrUrCrUrUrArArUrArArGrGrCr |
| targeting | | TRAC | ArUrCrCrUrUrCrCrGrArUrGrCrUrGrArCrUrUrCrUrCrArCrCrGrU |
| TRAC | | C3 | rCrCrGrUrUrUrUrCrCrArArUrArGrGrArGrCrGrGrGrCrGrGrUrAr |
| | | | UrGrU*mU*mU*mU |
| MG3-6/3 | 138 | MG3- | mU*mUmG*rArArArGrUrUrUrArGrGrUrUrCrGrUrArUrCrUrGrUrU |
| 4 sgRNA | | 6/3-4 | rGrArGrArArUrCrGrArArArGrArUrUrCrUrUrArArUrArArGrGrCr |
| targeting | | TRAC | ArUrCrCrUrUrCrCrGrArUrGrCrUrGrArCrUrUrCrUrCrArCrCrGrU |
| TRAC | | D3 | rCrCrGrUrUrUrUrCrCrArArUrArGrGrArGrCrGrGrGrCrGrGrUrAr |
| | | | UrGrU*mU*mU*mU |
| DNA | 139 | MG3- | GCCGTGTACCAGCTGAGAGACT |
| sequence | | 6/3-4 | |
| of TRAC | | TRAC | |
| target site | | A1 | |
| DNA | 140 | MG3- | ATTCACCGATTTTGATTCTCAA |
| sequence | | 6/3-4 | |
| of TRAC | | TRAC | |
| target site | | B1 | |
| DNA | 141 | MG3- | GATTCTGATGTGTATATCACAG |
| sequence | | 6/3-4 | |
| of TRAC | | TRAC | |
| target site | | C1 | |
| DNA | 142 | MG3- | AACAGTGCTGTGGCCTGGAGCA |
| sequence | | 6/3-4 | |
| of TRAC | | TRAC | |
| target site | | D1 | |
| DNA | 143 | MG3- | GGCTGGGGAAGAAGGTGTCTTC |
| sequence | | 6/3-4 | |
| of TRAC | | TRAC | |
| target site | | E1 | |
| DNA | 144 | MG3- | GTTTTGTCTGTGATATACACAT |
| sequence | | 6/3-4 | |
| of TRAC | | TRAC | |
| target site | | F1 | |
| DNA | 145 | MG3- | TTACTTTGTGACACATTTGTTT |
| sequence | | 6/3-4 | |
| of TRAC | | TRAC | |
| target site | | G1 | |
| DNA | 146 | MG3- | TTGTGACACATTTGTTTGAGAA |
| sequence | | 6/3-4 | |
| of TRAC | | TRAC | |
| target site | | H1 | |
| DNA | 147 | MG3- | TGTGACACATTTGTTTGAGAAT |
| sequence | | 6/3-4 | |
| of TRAC | | TRAC | |
| target site | | A2 | |
| DNA | 148 | MG3- | ATTTGTTTGAGAATCAAAATCG |
| sequence | | 6/3-4 | |
| of TRAC | | TRAC | |
| target site | | B2 | |
| DNA | 149 | MG3- | TTCCTGTGATGTCAAGCTGGTC |
| sequence | | 6/3-4 | |
| of TRAC | | TRAC | |
| target site | | C2 | |
| DNA | 150 | MG3- | TCCTGTGATGTCAAGCTGGTCG |
| sequence | | 6/3-4 | |
| of TRAC | | TRAC | |
| target site | | D2 | |
| DNA | 151 | MG3- | GTCAAGCTGGTCGAGAAAAGCT |
| sequence | | 6/3-4 | |
| of TRAC | | TRAC | |
| target site | | E2 | |
| DNA | 152 | MG3- | AGCTTGACATCACAGGAACTTT |
| sequence | | 6/3-4 | |
| of TRAC | | TRAC | |
| target site | | F2 | |
| DNA | 153 | MG3- | GACATCACAGGAACTTTCTAAA |
| sequence | | 6/3-4 | |
| of TRAC | | TRAC | |
| target site | | G2 | |
| DNA | 154 | MG3- | TTACAGATACGAACCTAAACTT |
| sequence | | 6/3-4 | |
| of TRAC | | TRAC | |
| target site | | H2 | |
| DNA | 155 | MG3- | AAAACCTGTCAGTGATTGGGTT |
| sequence | | 6/3-4 | |
| of TRAC | | TRAC | |
| target site | | A3 | |
| DNA | 156 | MG3- | GATTGGGTTCCGAATCCTCCTC |
| sequence | | 6/3-4 | |
| of TRAC | | TRAC | |
| target site | | B3 | |
| DNA | 157 | MG3- | GGAACCCAATCACTGACAGGTT |
| sequence | | 6/3-4 | |
| of TRAC | | TRAC | |
| target site | | C3 | |
| DNA | 158 | MG3- | TTGAAAGTTTAGGTTCGTATCT |
| sequence | | 6/3-4 | |
| of TRAC | | TRAC | |
| target site | | D3 | |

(r = native ribose base, m = 2′-O methyl modified base, F = 2′ Fluro modified base,
* = phosphorothioate bond)

### Example 12—Analysis of Gene-Editing Outcomes at the DNA Level for B32M in HEK293T Cells

[0398] Nucleofection of MG3-6/4 RNPs (104 pmol protein/300 pmol guide) comprising sgRNAs described below in Table 9B and SEQ ID NOs: 159-210 was performed into HEK293T cells (200,000 cells) using electroporation. Cells were harvested and genomic DNA prepared three days post-transfection. PCR primers appropriate for use in NGS-based DNA sequencing were generated, optimized, and used to amplify the individual target sequences for each guide RNA. The amplicons were sequenced and analyzed to determine gene editing (FIG. 17). The results show that sgRNAs A1, GU, B2, H2, and B4 were the most effective for inducing editing, with appreciable editing also being detected for sgRNAs C, D1, A2, H1, E2, F2, G2, A3, C3, and D3.

TABLE 9B
gRNAs and Targeting Sequences Used
in Example 12

| | SEQ | | |
|---|---|---|---|
| | ID | | |
| Category | NO: | Name | Sequence |
| MG3-6/3- | 159 | MG3- | mU*mC*mA*rCrGrCrUrGrGrArU |
| 4 sgRNA | | 6/3-4 | rArGrCrCrUrCrCrArGrGrCrGr |
| targeting | | B2M | UrUrGrArGrArArUrCrGrArArA |
| B2M | | A1 | rGrArUrUrCrUrUrArArUrArAr |
| | | | GrGrCrArUrCrCrUrUrCrCrGrA |
| | | | rUrGrCrUrGrArCrUrUrCrUrCr |
| | | | ArCrCrGrUrCrCrGrUrUrUrUrC |
| | | | rCrArArUrArGrGrArGrCrGrGr |
| | | | GrCrGrGrUrArUrGrU*mU*mU*m |
| | | | U |
| MG3-6/3- | 160 | MG3- | mG*mG*mU*rUrUrArCrUrCrArC |
| 4 sgRNA | | 6/3-4 | rGrUrCrArUrCrCrArGrCrArGr |
| targeting | | B2M | UrUrGrArGrArArUrCrGrArArA |
| B2M | | B1 | rGrArUrUrCrUrUrArArUrArAr |
| | | | GrGrCrArUrCrCrUrUrCrCrGrA |
| | | | rUrGrCrUrGrArCrUrUrCrUrCr |
| | | | ArCrCrGrUrCrCrGrUrUrUrUrC |
| | | | rCrArArUrArGrGrArGrCrGrGr |
| | | | GrCrGrGrUrArUrGrU*mU*mU*m |
| | | | U |
| MG3-6/3- | 161 | MG3- | mA*mC*mU*rCrArCrGrUrCrArU |
| 4 sgRNA | | 6/3-4 | rCrCrArGrCrArGrArGrArArGr |
| targeting | | B2M | UrUrGrArGrArArUrCrGrArArA |
| B2M | | C1 | rGrArUrUrCrUrUrArArUrArAr |
| | | | GrGrCrArUrCrCrUrUrCrCrGrA |
| | | | rUrGrCrUrGrArCrUrUrCrUrCr |
| | | | ArCrCrGrUrCrCrGrUrUrUrUrC |
| | | | rCrArArUrArGrGrArGrCrGrGr |
| | | | GrCrGrGrUrArUrGrU*mU*mU*m |
| | | | U |
| MG3-6/3- | 162 | MG3- | mUmC*mA*rUrCrCrArGrCrArGr |
| 4 sgRNA | | 6/3-4 | ArGrArArUrGrGrArArArGrGrU |
| targeting | | B2M | rUrGrArGrArArUrCrGrArArAr |
| B2M | | D1 | GrArUrUrCrUrUrArArUrArArG |
| | | | rGrCrArUrCrCrUrUrCrCrGrAr |
| | | | UrGrCrUrGrArCrUrUrCrUrCrA |
| | | | rCrCrGrUrCrCrGrUrUrUrUrCr |
| | | | CrArArUrArGrGrArGrCrGrGrG |
| | | | rCrGrGrUrArUrGrU*mU*mU*mU |
| MG3-6/3- | 163 | MG3- | mA*mG*mA*rGrArArUrGrGrArA |
| 4 sgRNA | | 6/3-4 | rArGrUrCrArArArUrUrUrCrGr |
| targeting | | B2M | UrUrGrArGrArArUrCrGrArArA |
| B2M | | E1 | rGrArUrUrCrUrUrArArUrArAr |
| | | | GrGrCrArUrCrCrUrUrCrCrGrA |
| | | | rUrGrCrUrGrArCrUrUrCrUrCr |
| | | | ArCrCrGrUrCrCrGrUrUrUrUrC |
| | | | rCrArArUrArGrGrArGrCrGrGr |
| | | | GrCrGrGrUrArUrGrU*mU*mU*m |
| | | | U |
| MG3-6/3- | 164 | MG3- | mC *mG*mA*rCrArUrUrGrArAr |
| 4 sgRNA | | 6/3-4 | GrUrUrGrArCrUrUrArCrUrGrG |
| targeting | | B2M | rUrUrGrArGrArArUrCrGrArAr |
| B2M | | F1 | ArGrArUrUrCrUrUrArArUrArA |
| | | | rGrGrCrArUrCrCrUrUrCrCrGr |
| | | | ArUrGrCrUrGrArCrUrUrCrUrC |
| | | | rArCrCrGrUrCrCrGrUrUrUrUr |
| | | | CrCrArArUrArGrGrArGrCrGrG |
| | | | rGrCrGrGrUrArUrGrU*mU*mU* |
| | | | mU |
| MG3-6/3- | 165 | MG3- | mU*mU*mG*rArCrUrUrArCrUrG |
| 4 sgRNA | | 6/3-4 | rArArGrArArUrGrGrArGrArGr |
| targeting | | B2M | UrUrGrArGrArArUrCrGrArArA |
| B2M | | G1 | rGrArUrUrCrUrUrArArUrArAr |
| | | | GrGrCrArUrCrCrUrUrCrCrGrA |
| | | | rUrGrCrUrGrArCrUrUrCrUrCr |
| | | | ArCrCrGrUrCrCrGrUrUrUrUrC |
| | | | rCrArArUrArGrGrArGrCrGrGr |
| | | | GrCrGrGrUrArUrGrU*mU*mU*m |
| | | | U |
| MG3-6/3- | 166 | MG3- | mUmU*mA*rCrUrGrArArGrArAr |
| 4 sgRNA | | 6/3-4 | UrGrGrArGrArGrArGrArArGrU |
| targeting | | B2M | rUrGrArGrArArUrCrGrArArAr |
| B2M | | H1 | GrArUrUrCrUrUrArArUrArArG |
| | | | rGrCrArUrCrCrUrUrCrCrGrAr |
| | | | UrGrCrUrGrArCrUrUrCrUrCrA |
| | | | rCrCrGrUrCrCrGrUrUrUrUrCr |
| | | | CrArArUrArGrGrArGrCrGrGrG |
| | | | rCrGrGrUrArUrGrU*mU*mU*mU |
| MG3-6/3- | 167 | MG3- | mU*mA*mC*rUrGrArArGrArArU |
| 4 sgRNA | | 6/3-4 | rGrGrArGrArGrArGrArArUrGr |
| targeting | | B2M | UrUrGrArGrArArUrCrGrArArA |
| B2M | | A2 | rGrArUrUrCrUrUrArArUrArAr |
| | | | GrGrCrArUrCrCrUrUrCrCrGrA |
| | | | rUrGrCrUrGrArCrUrUrCrUrCr |
| | | | ArCrCrGrUrCrCrGrUrUrUrUrC |
| | | | rCrArArUrArGrGrArGrCrGrGr |
| | | | GrCrGrGrUrArUrGrU*mU*mU*m |
| | | | U |
| MG3-6/3- | 168 | MG3- | mA*mC*mU*rGrArArGrArArUrG |
| 4 sgRNA | | 6/3-4 | rGrArGrArGrArGrArArUrUrGr |
| targeting | | B2M | UrUrGrArGrArArUrCrGrArArA |
| B2M | | B2 | rGrArUrUrCrUrUrArArUrArAr |
| | | | GrGrCrArUrCrCrUrUrCrCrGrA |
| | | | rUrGrCrUrGrArCrUrUrCrUrCr |
| | | | ArCrCrGrUrCrCrGrUrUrUrUrC |
| | | | rCrArArUrArGrGrArGrCrGrGr |
| | | | GrCrGrGrUrArUrGrU*mU*mU*m |
| | | | U |
| MG3-6/3- | 169 | MG3- | mU*mC*mU*rUrUrCrUrArUrCrU |
| 4 sgRNA | | 6/3-4 | rCrUrUrGrUrArCrUrArCrArGr |
| targeting | | B2M | UrUrGrArGrArArUrCrGrArArA |
| B2M | | C2 | rGrArUrUrCrUrUrArArUrArAr |
| | | | GrGrCrArUrCrCrUrUrCrCrGrA |
| | | | rUrGrCrUrGrArCrUrUrCrUrCr |
| | | | ArCrCrGrUrCrCrGrUrUrUrUrC |
| | | | rCrArArUrArGrGrArGrCrGrGr |
| | | | GrCrGrGrUrArUrGrU*mU*mU*m |
| | | | U |
| MG3-6/3- | 170 | MG3- | mU*mA*mC*rUrArCrArCrUrGrA |
| 4 sgRNA | | 6/3-4 | rArUrUrCrArCrCrCrCrCrArGr |
| targeting | | B2M | UrUrGrArGrArArUrCrGrArArA |
| B2M | | D2 | rGrArUrUrCrUrUrArArUrArAr |
| | | | GrGrCrArUrCrCrUrUrCrCrGrA |
| | | | rUrGrCrUrGrArCrUrUrCrUrCr |
| | | | ArCrCrGrUrCrCrGrUrUrUrUrC |
| | | | rCrArArUrArGrGrArGrCrGrGr |
| | | | GrCrGrGrUrArUrGrU*mU*mU*m |
| | | | U |
| MG3-6/3- | 171 | MG3- | mA*mC*mU*rArCrArCrUrGrArA |
| 4 sgRNA | | 6/3-4 | rUrUrCrArCrCrCrCrCrArCrGr |
| targeting | | B2M | UrUrGrArGrArArUrCrGrArArA |
| B2M | | E2 | rGrArUrUrCrUrUrArArUrArAr |
| | | | GrGrCrArUrCrCrUrUrCrCrGrA |
| | | | rUrGrCrUrGrArCrUrUrCrUrCr |
| | | | ArCrCrGrUrCrCrGrUrUrUrUrC |
| | | | rCrArArUrArGrGrArGrCrGrGr |
| | | | GrCrGrGrUrArUrGrU*mU*mU*m |
| | | | U |
| MG3-6/3- | 172 | MG3- | mC*mU*mA*rCrArCrUrGrArArU |
| 4 sgRNA | | 6/3-4 | rUrCrArCrCrCrCrCrArCrUrGr |
| targeting | | B2M | UrUrGrArGrArArUrCrGrArArA |
| B2M | | F2 | rGrArUrUrCrUrUrArArUrArAr |
| | | | GrGrCrArUrCrCrUrUrCrCrGrA |
| | | | rUrGrCrUrGrArCrUrUrCrUrCr |
| | | | ArCrCrGrUrCrCrGrUrUrUrUrC |
| | | | rCrArArUrArGrGrArGrCrGrGr |
| | | | GrCrGrGrUrArUrGrU*mU*mU*m |
| | | | U |
| MG3-6/3- | 173 | MG3- | mA*mU*mA*rCrUrCrArUrCrUrU |
| 4 sgRNA | | 6/3-4 | rUrUrUrCrArGrUrGrGrGrGrGr |
| targeting | | B2M | UrUrGrArGrArArUrCrGrArArA |
| B2M | | G2 | rGrArUrUrCrUrUrArArUrArAr |
| | | | GrGrCrArUrCrCrUrUrCrCrGrA |
| | | | rUrGrCrUrGrArCrUrUrCrUrCr |
| | | | ArCrCrGrUrCrCrGrUrUrUrUrC |
| | | | rCrArArUrArGrGrArGrCrGrGr |
| | | | GrCrGrGrUrArUrGrU*mU*mU*m |
| | | | U |
| MG3-6/3- | 174 | MG3- | mG*mA*mA*rUrUrCrArGrUrGrU |
| 4 sgRNA | | 6/3-4 | rArGrUrArCrArArGrArGrArGr |
| targeting | | B2M | UrUrGrArGrArArUrCrGrArArA |
| B2M | | H2 | rGrArUrUrCrUrUrArArUrArAr |
| | | | GrGrCrArUrCrCrUrUrCrCrGrA |
| | | | rUrGrCrUrGrArCrUrUrCrUrCr |
| | | | ArCrCrGrUrCrCrGrUrUrUrUrC |
| | | | rCrArArUrArGrGrArGrCrGrGr |
| | | | GrCrGrGrUrArUrGrU*mU*mU*m |
| | | | U |
| MG3-6/3- | 175 | MG3- | mG*mA*mG*rArUrArGrArArArG |
| 4 sgRNA | | 6/3-4 | rArCrCrArGrUrCrCrUrUrGrGr |
| targeting | | B2M | UrUrGrArGrArArUrCrGrArArA |
| B2M | | A3 | rGrArUrUrCrUrUrArArUrArAr |
| | | | GrGrCrArUrCrCrUrUrCrCrGrA |
| | | | rUrGrCrUrGrArCrUrUrCrUrCr |
| | | | ArCrCrGrUrCrCrGrUrUrUrUrC |
| | | | rCrArArUrArGrGrArGrCrGrGr |
| | | | GrCrGrGrUrArUrGrU*mU*mU*m |
| | | | U |
| MG3-6/3- | 176 | MG3- | mC*mA*mG*rUrCrCrUrUrGrCrU |
| 4 sgRNA | | 6/3-4 | rGrArArArGrArCrArArGrUrGr |
| targeting | | B2M | UrUrGrArGrArArUrCrGrArArA |
| B2M | | B3 | rGrArUrUrCrUrUrArArUrArAr |
| | | | GrGrCrArUrCrCrUrUrCrCrGrA |
| | | | rUrGrCrUrGrArCrUrUrCrUrCr |
| | | | ArCrCrGrUrCrCrGrUrUrUrUrC |
| | | | rCrArArUrArGrGrArGrCrGrGr |
| | | | GrCrGrGrUrArUrGrU*mU*mU*m |
| | | | U |
| MG3-6/3- | 177 | MG3- | mA*mG*mU*rCrArArCrUrUrCrA |
| 4 sgRNA | | 6/3-4 | rArUrGrUrCrGrGrArUrGrGrGr |
| targeting | | B2M | UrUrGrArGrArArUrCrGrArArA |
| B2M | | C3 | rGrArUrUrCrUrUrArArUrArAr |
| | | | GrGrCrArUrCrCrUrUrCrCrGrA |
| | | | rUrGrCrUrGrArCrUrUrCrUrCr |
| | | | ArCrCrGrUrCrCrGrUrUrUrUrC |
| | | | rCrArArUrArGrGrArGrCrGrGr |
| | | | GrCrGrGrUrArUrGrU*mU*mU*m |
| | | | U |
| MG3-6/3- | 178 | MG3- | mA*mA*mA*rCrCrCrArGrArCrA |
| 4 sgRNA | | 6/3-4 | rCrArUrArGrCrArArUrUrCrGr |
| targeting | | B2M | UrUrGrArGrArArUrCrGrArArA |
| B2M | | D3 | rGrArUrUrCrUrUrArArUrArAr |
| | | | GrGrCrArUrCrCrUrUrCrCrGrA |
| | | | rUrGrCrUrGrArCrUrUrCrUrCr |
| | | | ArCrCrGrUrCrCrGrUrUrUrUrC |
| | | | rCrArArUrArGrGrArGrCrGrGr |
| | | | GrCrGrGrUrArUrGrU*mU*mU*m |
| | | | U |
| MG3-6/3- | 179 | MG3- | mA*mA*mC*rCrCrArGrArCrArC |
| 4 sgRNA | | 6/3-4 | rArUrArGrCrArArUrUrCrArGr |
| targeting | | B2M | UrUrGrArGrArArUrCrGrArArA |
| B2M | | E3 | rGrArUrUrCrUrUrArArUrArAr |
| | | | GrGrCrArUrCrCrUrUrCrCrGrA |
| | | | rUrGrCrUrGrArCrUrUrCrUrCr |
| | | | ArCrCrGrUrCrCrGrUrUrUrUrC |
| | | | rCrArArUrArGrGrArGrCrGrGr |
| | | | GrCrGrGrUrArUrGrU*mU*mU*m |
| | | | U |
| MG3-6/3- | 180 | MG3- | mC*mU*mG*rCrUrGrGrArUrGrA |
| 4 sgRNA | | 6/3-4 | rCrGrUrGrArGrUrArArArCrGr |
| targeting | | B2M | UrUrGrArGrArArUrCrGrArArA |
| B2M | | F3 | rGrArUrUrCrUrUrArArUrArAr |
| | | | GrGrCrArUrCrCrUrUrCrCrGrA |
| | | | rUrGrCrUrGrArCrUrUrCrUrCr |
| | | | ArCrCrGrUrCrCrGrUrUrUrUrC |
| | | | rCrArArUrArGrGrArGrCrGrGr |
| | | | GrCrGrGrUrArUrGrU*mU*mU*m |
| | | | U |
| MG3-6/3- | 181 | MG3- | mA*mC*mC*rUrGrArArUrCrUrU |
| 4 sgRNA | | 6/3-4 | rUrGrGrArGrUrArCrCrUrGrGr |
| targeting | | B2M | UrUrGrArGrArArUrCrGrArArA |
| B2M | | G3 | rGrArUrUrCrUrUrArArUrArAr |
| | | | GrGrCrArUrCrCrUrUrCrCrGrA |
| | | | rUrGrCrUrGrArCrUrUrCrUrCr |
| | | | ArCrCrGrUrCrCrGrUrUrUrUrC |
| | | | rCrArArUrArGrGrArGrCrGrGr |
| | | | GrCrGrGrUrArUrGrU*mU*mU*m |
| | | | U |
| MG3-6/3- | 182 | MG3- | mU*mG*mC*rUrGrCrUrUrArCrA |
| 4 sgRNA | | 6/3-4 | rUrGrUrCrUrCrGrArUrCrUrGr |
| targeting | | B2M | UrUrGrArGrArArUrCrGrArArA |
| B2M | | H3 | rGrArUrUrCrUrUrArArUrArAr |
| | | | GrGrCrArUrCrCrUrUrCrCrGrA |
| | | | rUrGrCrUrGrArCrUrUrCrUrCr |
| | | | ArCrCrGrUrCrCrGrUrUrUrUrC |
| | | | rCrArArUrArGrGrArGrCrGrGr |
| | | | GrCrGrGrUrArUrGrU*mU*mU*m |
| | | | U |
| MG3-6/3- | 183 | MG3- | mG*mC*mU*rGrCrUrUrArCrArU |
| 4 sgRNA | | 6/3-4 | rGrUrCrUrCrGrArUrCrUrArGr |
| targeting | | B2M | UrUrGrArGrArArUrCrGrArArA |
| B2M | | A4 | rGrArUrUrCrUrUrArArUrArAr |
| | | | GrGrCrArUrCrCrUrUrCrCrGrA |
| | | | rUrGrCrUrGrArCrUrUrCrUrCr |
| | | | ArCrCrGrUrCrCrGrUrUrUrUrC |
| | | | rCrArArUrArGrGrArGrCrGrGr |
| | | | GrCrGrGrUrArUrGrU*mU*mU*m |
| | | | U |
| MG3-6/3- | 184 | MG3- | mC *mU*mG*rCrUrUrArCrArUr |
| 4 sgRNA | | 6/3-4 | GrUrCrUrCrGrArUrCrUrArUrG |
| targeting | | B2M | rUrUrGrArGrArArUrCrGrArAr |
| B2M | | B4 | ArGrArUrUrCrUrUrArArUrArA |
| | | | rGrGrCrArUrCrCrUrUrCrCrGr |
| | | | ArUrGrCrUrGrArCrUrUrCrUrC |
| | | | rArCrCrGrUrCrCrGrUrUrUrUr |
| | | | CrCrArArUrArGrGrArGrCrGrG |
| | | | rGrCrGrGrUrArUrGrU*mU*mU* |
| | | | mU |
| DNA | 185 | MG3- | TCACGCTGGATAGCCTCCAGGC |
| sequence | | 6/3-4 | |
| of B2M | | B2M | |
| target | | A1 | |
| site | | | |
| DNA | 186 | MG3- | GGTTTACTCACGTCATCCAGCA |
| sequence | | 6/3-4 | |
| of B2M | | B2M | |
| target | | B1 | |
| site | | | |
| DNA | 187 | MG3- | ACTCACGTCATCCAGCAGAGAA |
| sequence | | 6/3-4 | |
| of B2M | | B2M | |
| target | | C1 | |
| site | | | |
| DNA | 188 | MG3- | TCATCCAGCAGAGAATGGAAAG |
| sequence | | 6/3-4 | |
| of B2M | | B2M | |
| target | | D1 | |
| site | | | |
| DNA | 189 | MG3- | AGAGAATGGAAAGTCAAATTTC |
| sequence | | 6/3-4 | |
| of B2M | | B2M | |
| target | | E1 | |
| site | | | |
| DNA | 190 | MG3- | CGACATTGAAGTTGACTTACTG |
| sequence | | 6/3-4 | |
| of B2M | | B2M | |
| target | | F1 | |
| site | | | |
| DNA | 191 | MG3- | TTGACTTACTGAAGAATGGAGA |
| sequence | | 6/3-4 | |
| of B2M | | B2M | |
| target | | G1 | |
| site | | | |
| DNA | 192 | MG3- | TTACTGAAGAATGGAGAGAGAA |
| sequence | | 6/3-4 | |
| of B2M | | B2M | |
| target | | H1 | |
| site | | | |
| DNA | 193 | MG3- | TACTGAAGAATGGAGAGAGAAT |
| sequence | | 6/3-4 | |
| of B2M | | B2M | |
| target | | A2 | |
| site | | | |
| DNA | 194 | MG3- | ACTGAAGAATGGAGAGAGAATT |
| sequence | | 6/3-4 | |
| of B2M | | B2M | |
| target | | B2 | |
| site | | | |
| DNA | 195 | MG3- | TCTTTCTATCTCTTGTACTACA |
| sequence | | 6/3-4 | |
| of B2M | | B2M | |
| target | | C2 | |
| site | | | |
| DNA | 196 | MG3- | TACTACACTGAATTCACCCCCA |
| sequence | | 6/3-4 | |
| of B2M | | B2M | |
| target | | D2 | |
| site | | | |
| DNA | 197 | MG3- | ACTACACTGAATTCACCCCCAC |
| sequence | | 6/3-4 | |
| of B2M | | B2M | |
| target | | E2 | |
| site | | | |
| DNA | 198 | MG3- | CTACACTGAATTCACCCCCACT |
| sequence | | 6/3-4 | |
| of B2M | | B2M | |
| target | | F2 | |
| site | | | |
| DNA | 199 | MG3- | ATACTCATCTTTTTCAGTGGGG |
| sequence | | 6/3-4 | |
| of B2M | | B2M | |
| target | | G2 | |
| site | | | |
| DNA | 200 | MG3- | GAATTCAGTGTAGTACAAGAGA |
| sequence | | 6/3-4 | |
| of B2M | | B2M | |
| target | | H2 | |
| site | | | |
| DNA | 201 | MG3- | GAGATAGAAAGACCAGTCCTTG |
| sequence | | 6/3-4 | |
| of B2M | | B2M | |
| target | | A3 | |
| site | | | |
| DNA | 202 | MG3- | CAGTCCTTGCTGAAAGACAAGT |
| sequence | | 6/3-4 | |
| of B2M | | B2M | |
| target | | B3 | |
| site | | | |
| DNA | 203 | MG3- | AGTCAACTTCAATGTCGGATGG |
| sequence | | 6/3-4 | |
| of B2M | | B2M | |
| target | | C3 | |
| site | | | |
| DNA | 204 | MG3- | AAACCCAGACACATAGCAATTC |
| sequence | | 6/3-4 | |
| of B2M | | B2M | |
| target | | D3 | |
| site | | | |
| DNA | 205 | MG3- | AACCCAGACACATAGCAATTCA |
| sequence | | 6/3-4 | |
| of B2M | | B2M | |
| target | | E3 | |
| site | | | |
| DNA | 206 | MG3- | CTGCTGGATGACGTGAGTAAAC |
| sequence | | 6/3-4 | |
| of B2M | | B2M | |
| target | | F3 | |
| site | | | |
| DNA | 207 | MG3- | ACCTGAATCTTTGGAGTACCTG |
| sequence | | 6/3-4 | |
| of B2M | | B2M | |
| target | | G3 | |
| site | | | |
| DNA | 208 | MG3- | TGCTGCTTACATGTCTCGATCT |
| sequence | | 6/3-4 | |
| of B2M | | B2M | |
| target | | H3 | |
| site | | | |
| DNA | 209 | MG3- | GCTGCTTACATGTCTCGATCTA |
| sequence | | 6/3-4 | |
| of B2M | | B2M | |
| target | | A4 | |
| site | | | |
| DNA | 210 | MG3- | CTGCTTACATGTCTCGATCTAT |
| sequence | | 6/3-4 | |
| of B2M | | B2M | |
| target | | B4 | |
| site | | | |

(r = native ribose base, m = 2′-O methyl modified base, F = 2′ Fluro modified base, * = phosphorothioate bond)

### Example 13—Analysis of Gene-Editing Outcomes at the DNA and Phenotypic Levels for TRAC in T Cells

[0399] Primary T cells were purified from PMBCs using a negative selection. Nucleofection of MG3-6/4 RNPs (104 pmol protein/120 pmol guide) comprising selected sgRNAs described in Table 9A and SEQ ID NOs: 119-158 was performed into T cells (200,000) using electroporation. Cells were harvested and genomic DNA prepared three days post-transfection. PCR primers appropriate for use in NGS-based DNA sequencing were generated, optimized, and used to amplify the individual target sequences for each guide RNA. The amplicons were sequenced and analyzed to determine gene editing. For analysis by flow cytometry, 3 days post-nucleofection, 100,000 T cells were stained with anti-CD3 antibody for 30 minutes at 4° C. and analyzed by flow cytometry (FIG. 18). Results indicated that sgRNAs C1, D2, F2, H2, A3, B3, C3, and D3 showed appreciable editing, with the most editing performed by sgRNAs C1 and B3.

### Example 14—Analysis of Gene-Editing Outcomes at the DNA Level for B2M in T Cells

[0400] Primary T cells were purified from PMBCs using a negative selection. Nucleofection of MG3-6/4 RNPs (104 pmol protein/120 pmol guide) comprising selected sgRNAs described in Table 9B and SEQ ID NOs: 159-210 was performed into T cells (200,000) using electroporation. Cells were harvested and genomic DNA prepared three days post-transfection. PCR primers appropriate for use in NGS-based DNA sequencing were generated, optimized, and used to amplify the individual target sequences for each guide RNA. The amplicons were sequenced and analyzed to determine gene editing (FIG. 19).

### Example 15—Analysis of Gene-Editing Outcomes at the Phenotypic Level for TRBC1 and TRBC2 in T Cells

[0401] Primary T cells were purified from PBMCs using a negative selection. Nucleofection of MG3-6/4 RNPs (104 pmol protein/120 pmol guide) comprising sgRNAs described below in Table 9C below and SEQ ID NOs: 211-382 was performed into T cells (200,000) using electroporation. For analysis by flow cytometry, 3 days post-nucleofection, 100,000 T cells were stained with anti-CD3 antibody for 30 minutes at 4° C. and analyzed by flow cytometry (FIG. 20). The results show, the highest-performing sgRNAs for TRBC1 were A1, B1, E1, G4, H4, and B5 (FIG. 20). Similarly, the highest performing sgRNAs for TRBC2 were D1, H1, and A5.

TABLE 9C
gRNAs and Targeting Sequences Used
in Example 15

| | SEQ | | |
|---|---|---|---|
| | ID | | |
| Category | NO: | Name | Sequence |
| MG3-6/3- | 211 | MG3- | mC*mA*mG*rArArGrCrArGrArG |
| 4 sgRNA | | 6/3-4 | rArUrCrUrCrCrCrArCrArCrGr |
| targeting | A1 | TRBC1 | UrUrGrArGrArArUrCrGrArArA |
| TRBC1 | | | rGrArUrUrCrUrUrArArUrArAr |
| | | | GrGrCrArUrCrCrUrUrCrCrGrA |
| | | | rUrGrCrUrGrArCrUrUrCrUrCr |
| | | | ArCrCrGrUrCrCrGrUrUrUrUrC |
| | | | rCrArArUrArGrGrArGrCrGrGr |
| | | | GrCrGrGrUrArUrGrU*mU*mU*m |
| | | | U |
| MG3-6/3- | 212 | MG3- | mC*mC*mA*rCrGrUrGrGrArGrC |
| 4 sgRNA | | 6/3- | rUrGrArGrCrUrGrGrUrGrGrGr |
| targeting | 4 | TRBC1 | UrUrGrArGrArArUrCrGrArArA |
| TRBC1 | | B1 | rGrArUrUrCrUrUrArArUrArAr |
| | | | GrGrCrArUrCrCrUrUrCrCrGrA |
| | | | rUrGrCrUrGrArCrUrUrCrUrCr |
| | | | ArCrCrGrUrCrCrGrUrUrUrUrC |
| | | | rCrArArUrArGrGrArGrCrGrGr |
| | | | GrCrGrGrUrArUrGrU*mU*mU*m |
| | | | U |
| MG3-6/3- | 213 | MG3- | mA*mG*mU*rCrCrArGrUrUrCrU |
| 4 sgRNA | | 6/3- | rArCrGrGrGrCrUrCrUrCrGrGr |
| targeting | 4 | TRBC1 | UrUrGrArGrArArUrCrGrArArA |
| TRBC1 | | C1 | rGrArUrUrCrUrUrArArUrArAr |
| | | | GrGrCrArUrCrCrUrUrCrCrGrA |
| | | | rUrGrCrUrGrArCrUrUrCrUrCr |
| | | | ArCrCrGrUrCrCrGrUrUrUrUrC |
| | | | rCrArArUrArGrGrArGrCrGrGr |
| | | | GrCrGrGrUrArUrGrU*mU*mU*m |
| | | | U |
| MG3-6/3- | 214 | MG3- | mG*mA*mU*rUrArGrGrUrGrArG |
| 4 sgRNA | | 6/3- | rArCrCrArGrCrUrArCrCrArGr |
| targeting | 4 | TRBC1 | UrUrGrArGrArArUrCrGrArArA |
| TRBC1 | | D1 | rGrArUrUrCrUrUrArArUrArAr |
| | | | GrGrCrArUrCrCrUrUrCrCrGrA |
| | | | rUrGrCrUrGrArCrUrUrCrUrCr |
| | | | ArCrCrGrUrCrCrGrUrUrUrUrC |
| | | | rCrArArUrArGrGrArGrCrGrGr |
| | | | GrCrGrGrUrArUrGrU*mU*mU*m |
| | | | U |
| MG3-6/3- | 215 | MG3- | mA*mU*mU*rArGrGrUrGrArGrA |
| 4 sgRNA | | 6/3- | rCrCrArGrCrUrArCrCrArGrGr |
| targeting | 4 | TRBC1 | UrUrGrArGrArArUrCrGrArArA |
| TRBC1 | | E1 | rGrArUrUrCrUrUrArArUrArAr |
| | | | GrGrCrArUrCrCrUrUrCrCrGrA |
| | | | rUrGrCrUrGrArCrUrUrCrUrCr |
| | | | ArCrCrGrUrCrCrGrUrUrUrUrC |
| | | | rCrArArUrArGrGrArGrCrGrGr |
| | | | GrCrGrGrUrArUrGrU*mU*mU*m |
| | | | U |
| MG3-6/3- | 216 | MG3- | mU*mU*mA*rGrGrUrGrArGrArC |
| 4 sgRNA | | 6/3- | rCrArGrCrUrArCrCrArGrGrGr |
| targeting | 4 | TRBC1 | UrUrGrArGrArArUrCrGrArArA |
| TRBC1 | | F1 | rGrArUrUrCrUrUrArArUrArAr |
| | | | GrGrCrArUrCrCrUrUrCrCrGrA |
| | | | rUrGrCrUrGrArCrUrUrCrUrCr |
| | | | ArCrCrGrUrCrCrGrUrUrUrUrC |
| | | | rCrArArUrArGrGrArGrCrGrGr |
| | | | GrCrGrGrUrArUrGrU*mU*mU*m |
| | | | U |
| MG3-6/3- | 217 | MG3- | mU*mG*mA*rGrArCrCrArGrCrU |
| 4 sgRNA | | 6/3- | rArCrCrArGrGrGrArArArArGr |
| targeting | 4 | TRBC1 | UrUrGrArGrArArUrCrGrArArA |
| TRBC1 | | G1 | rGrArUrUrCrUrUrArArUrArAr |
| | | | GrGrCrArUrCrCrUrUrCrCrGrA |
| | | | rUrGrCrUrGrArCrUrUrCrUrCr |
| | | | ArCrCrGrUrCrCrGrUrUrUrUrC |
| | | | rCrArArUrArGrGrArGrCrGrGr |
| | | | GrCrGrGrUrArUrGrU*mU*mU*m |
| | | | U |
| MG3-6/3- | 218 | MG3- | mC*mA*mG*rGrUrArGrCrArGrA |
| 4 sgRNA | | 6/3- | rCrArArGrArCrUrArGrArUrGr |
| targeting | 4 | TRBC1 | UrUrGrArGrArArUrCrGrArArA |
| TRBC1 | | H1 | rGrArUrUrCrUrUrArArUrArAr |
| | | | GrGrCrArUrCrCrUrUrCrCrGrA |
| | | | rUrGrCrUrGrArCrUrUrCrUrCr |
| | | | ArCrCrGrUrCrCrGrUrUrUrUrC |
| | | | rCrArArUrArGrGrArGrCrGrGr |
| | | | GrCrGrGrUrArUrGrU*mU*mU*m |
| | | | U |
| MG3-6/3- | 219 | MG3- | mA*mG*mG*rUrArGrCrArGrArC |
| 4 sgRNA | | 6/3- | rArArGrArCrUrArGrArUrCrGr |
| targeting | 4 | TRBC1 | UrUrGrArGrArArUrCrGrArArA |
| TRBC1 | | A2 | rGrArUrUrCrUrUrArArUrArAr |
| | | | GrGrCrArUrCrCrUrUrCrCrGrA |
| | | | rUrGrCrUrGrArCrUrUrCrUrCr |
| | | | ArCrCrGrUrCrCrGrUrUrUrUrC |
| | | | rCrArArUrArGrGrArGrCrGrGr |
| | | | GrCrGrGrUrArUrGrU*mU*mU*m |
| | | | U |
| MG3-6/3 | 220 | MG3- | mA*mG*mC*rArGrArCrArArGrA |
| 4 sgRNA | | 6/3- | rCrUrArGrArUrCrCrArArArGr |
| targeting | 4 | TRBC1 | UrUrGrArGrArArUrCrGrArArA |
| TRBC1 | | B2 | rGrArUrUrCrUrUrArArUrArAr |
| | | | GrGrCrArUrCrCrUrUrCrCrGrA |
| | | | rUrGrCrUrGrArCrUrUrCrUrCr |
| | | | ArCrCrGrUrCrCrGrUrUrUrUrC |
| | | | rCrArArUrArGrGrArGrCrGrGr |
| | | | GrCrGrGrUrArUrGrU*mU*mU*m |
| | | | U |
| MG3-6/3- | 221 | MG3- | mG*mG*mA*rArCrCrArGrCrGrC |
| 4 sgRNA | | 6/3- | rArCrArCrCrArUrGrArArGrGr |
| targeting | 4 | TRBC1 | UrUrGrArGrArArUrCrGrArArA |
| TRBC1 | | C2 | rGrArUrUrCrUrUrArArUrArAr |
| | | | GrGrCrArUrCrCrUrUrCrCrGrA |
| | | | rUrGrCrUrGrArCrUrUrCrUrCr |
| | | | ArCrCrGrUrCrCrGrUrUrUrUrC |
| | | | rCrArArUrArGrGrArGrCrGrGr |
| | | | GrCrGrGrUrArUrGrU*mU*mU*m |
| | | | U |
| MG3-6/3- | 222 | MG3- | mG*mUmG*rGrCrUrGrArCrArUr |
| 4 sgRNA | | 6/3- | CrUrGrCrArUrGrGrCrArGrGrU |
| targeting | 4 | TRBC1 | rUrGrArGrArArUrCrGrArArAr |
| TRBC1 | | D2 | GrArUrUrCrUrUrArArUrArArG |
| | | | rGrCrArUrCrCrUrUrCrCrGrAr |
| | | | UrGrCrUrGrArCrUrUrCrUrCrA |
| | | | rCrCrGrUrCrCrGrUrUrUrUrCr |
| | | | CrArArUrArGrGrArGrCrGrGrG |
| | | | rCrGrGrUrArUrGrU*mU*mU*mU |
| MG3-6/3 | 223 | MG3- | mG*mG*mC*rCrUrGrGrGrArGrU |
| 4 sgRNA | | 6/3- | rCrUrGrUrGrCrCrArArCrUrGr |
| targeting | 4 | TRBC1 | UrUrGrArGrArArUrCrGrArArA |
| TRBC1 | | E2 | rGrArUrUrCrUrUrArArUrArAr |
| | | | GrGrCrArUrCrCrUrUrCrCrGrA |
| | | | rUrGrCrUrGrArCrUrUrCrUrCr |
| | | | ArCrCrGrUrCrCrGrUrUrUrUrC |
| | | | rCrArArUrArGrGrArGrCrGrGr |
| | | | GrCrGrGrUrArUrGrU*mU*mU*m |
| | | | U |
| MG3-6/3- | 224 | MG3- | mC*mU*mG*rArCrUrUrUrArCrU |
| 4 sgRNA | | 6/3-4 | rUrUrUrArArUrUrGrCrCrUrGr |
| targeting | | TRBC1 | UrUrGrArGrArArUrCrGrArArA |
| TRBC1 | | F2 | rGrArUrUrCrUrUrArArUrArAr |
| | | | GrGrCrArUrCrCrUrUrCrCrGrA |
| | | | rUrGrCrUrGrArCrUrUrCrUrCr |
| | | | ArCrCrGrUrCrCrGrUrUrUrUrC |
| | | | rCrArArUrArGrGrArGrCrGrGr |
| | | | GrCrGrGrUrArUrGrU*mU*mU*m |
| | | | U |
| MG3-6/3- | 225 | MG3- | mU*mG*mA*rCrUrUrUrArCrUrU |
| 4 sgRNA | | 6/3- | rUrUrArArUrUrGrCrCrUrArGr |
| targeting | 4 | TRBC1 | UrUrGrArGrArArUrCrGrArArA |
| TRBC1 | | G2 | rGrArUrUrCrUrUrArArUrArAr |
| | | | GrGrCrArUrCrCrUrUrCrCrGrA |
| | | | rUrGrCrUrGrArCrUrUrCrUrCr |
| | | | ArCrCrGrUrCrCrGrUrUrUrUrC |
| | | | rCrArArUrArGrGrArGrCrGrGr |
| | | | GrCrGrGrUrArUrGrU*mU*mU*m |
| | | | U |
| MG3-6/3- | 226 | MG3- | mG*mA*mC*rUrUrUrArCrUrUrU |
| 4 sgRNA | | 6/3- | rUrArArUrUrGrCrCrUrArUrGr |
| targeting | 4 | TRBC1 | UrUrGrArGrArArUrCrGrArArA |
| TRBC1 | | H2 | rGrArUrUrCrUrUrArArUrArAr |
| | | | GrGrCrArUrCrCrUrUrCrCrGrA |
| | | | rUrGrCrUrGrArCrUrUrCrUrCr |
| | | | ArCrCrGrUrCrCrGrUrUrUrUrC |
| | | | rCrArArUrArGrGrArGrCrGrGr |
| | | | GrCrGrGrUrArUrGrU*mU*mU*m |
| | | | U |
| MG3-6/3- | 227 | MG3- | mG*mG*mG*rArArGrGrArGrArA |
| 4 sgRNA | | 6/3- | rGrCrUrGrGrArGrUrCrArCrGr |
| targeting | 4 | TRBC1 | UrUrGrArGrArArUrCrGrArArA |
| TRBC1 | | A3 | rGrArUrUrCrUrUrArArUrArAr |
| | | | GrGrCrArUrCrCrUrUrCrCrGrA |
| | | | rUrGrCrUrGrArCrUrUrCrUrCr |
| | | | ArCrCrGrUrCrCrGrUrUrUrUrC |
| | | | rCrArArUrArGrGrArGrCrGrGr |
| | | | GrCrGrGrUrArUrGrU*mU*mU*m |
| | | | U |
| MG3-6/3- | 228 | MG3- | mG*mG*mA*rArGrGrArGrArArG |
| 4 sgRNA | | 6/3- | rCrUrGrGrArGrUrCrArCrCrGr |
| targeting | 4 | TRBC1 | UrUrGrArGrArArUrCrGrArArA |
| TRBC1 | | B3 | rGrArUrUrCrUrUrArArUrArAr |
| | | | GrGrCrArUrCrCrUrUrCrCrGrA |
| | | | rUrGrCrUrGrArCrUrUrCrUrCr |
| | | | ArCrCrGrUrCrCrGrUrUrUrUrC |
| | | | rCrArArUrArGrGrArGrCrGrGr |
| | | | GrCrGrGrUrArUrGrU*mU*mU*m |
| | | | U |
| MG3-6/3- | 229 | MG3- | mA*mA*mC*rUrCrCrUrGrGrCrU |
| 4 sgRNA | | 6/3- | rCrUrUrArArUrArArCrCrCrGr |
| targeting | 4 | TRBC1 | UrUrGrArGrArArUrCrGrArArA |
| TRBC1 | | C3 | rGrArUrUrCrUrUrArArUrArAr |
| | | | GrGrCrArUrCrCrUrUrCrCrGrA |
| | | | rUrGrCrUrGrArCrUrUrCrUrCr |
| | | | ArCrCrGrUrCrCrGrUrUrUrUrC |
| | | | rCrArArUrArGrGrArGrCrGrGr |
| | | | GrCrGrGrUrArUrGrU*mU*mU*m |
| | | | U |
| MG3-6/3- | 230 | MG3- | mA*mA*mC*rUrUrUrCrUrCrUrU |
| 4 sgRNA | | 6/3- | rCrUrGrCrArGrGrUrCrArArGr |
| targeting | 4 | TRBC1 | UrUrGrArGrArArUrCrGrArArA |
| TRBC1 | | D3 | rGrArUrUrCrUrUrArArUrArAr |
| | | | GrGrCrArUrCrCrUrUrCrCrGrA |
| | | | rUrGrCrUrGrArCrUrUrCrUrCr |
| | | | ArCrCrGrUrCrCrGrUrUrUrUrC |
| | | | rCrArArUrArGrGrArGrCrGrGr |
| | | | GrCrGrGrUrArUrGrU*mU*mU*m |
| | | | U |
| MG3-6/3- | 231 | MG3- | mA*mC*mU*rCrCrArCrUrUrCrC |
| 4 sgRNA | | 6/3- | rArGrGrGrCrUrGrCrCrUrUrGr |
| targeting | 4 | TRBC1 | UrUrGrArGrArArUrCrGrArArA |
| TRBC1 | | E3 | rGrArUrUrCrUrUrArArUrArAr |
| | | | GrGrCrArUrCrCrUrUrCrCrGrA |
| | | | rUrGrCrUrGrArCrUrUrCrUrCr |
| | | | ArCrCrGrUrCrCrGrUrUrUrUrC |
| | | | rCrArArUrArGrGrArGrCrGrGr |
| | | | GrCrGrGrUrArUrGrU*mU*mU*m |
| | | | U |
| MG3-6/3- | 232 | MG3- | mC*mUmC*rCrArCrUrUrCrCrAr |
| 4 sgRNA | | 6/3- | GrGrGrCrUrGrCrCrUrUrCrGrU |
| targeting | 4 | TRBC1 | rUrGrArGrArArUrCrGrArArAr |
| TRBC1 | | F3 | GrArUrUrCrUrUrArArUrArArG |
| | | | rGrCrArUrCrCrUrUrCrCrGrAr |
| | | | UrGrCrUrGrArCrUrUrCrUrCrA |
| | | | rCrCrGrUrCrCrGrUrUrUrUrCr |
| | | | CrArArUrArGrGrArGrCrGrGrG |
| | | | rCrGrGrUrArUrGrU*mU*mU*mU |
| MG3-6/3- | 233 | MG3- | mU*mC*mC*rUrUrUrCrUrCrUrU |
| 4 sgRNA | | 6/3- | rGrArCrCrUrGrCrArGrArArGr |
| targeting | 4 | TRBC1 | UrUrGrArGrArArUrCrGrArArA |
| TRBC1 | | G3 | rGrArUrUrCrUrUrArArUrArAr |
| | | | GrGrCrArUrCrCrUrUrCrCrGrA |
| | | | rUrGrCrUrGrArCrUrUrCrUrCr |
| | | | ArCrCrGrUrCrCrGrUrUrUrUrC |
| | | | rCrArArUrArGrGrArGrCrGrGr |
| | | | GrCrGrGrUrArUrGrU*mU*mU*m |
| | | | U |
| MG3-6/3- | 234 | MG3- | mA*mG*mC*rCrArGrGrArGrUrU |
| 4 sgRNA | | 6/3- | rGrUrGrArGrGrArUrUrGrArGr |
| targeting | 4 | TRBC1 | UrUrGrArGrArArUrCrGrArArA |
| TRBC1 | | H3 | rGrArUrUrCrUrUrArArUrArAr |
| | | | GrGrCrArUrCrCrUrUrCrCrGrA |
| | | | rUrGrCrUrGrArCrUrUrCrUrCr |
| | | | ArCrCrGrUrCrCrGrUrUrUrUrC |
| | | | rCrArArUrArGrGrArGrCrGrGr |
| | | | GrCrGrGrUrArUrGrU*mU*mU*m |
| | | | U |
| MG3-6/3- | 235 | MG3- | mA*mG*mU*rArGrUrArGrGrGrC |
| 4 sgRNA | | 6/3- | rCrCrArUrUrGrArCrCrArCrGr |
| targeting | 4 | TRBC1 | UrUrGrArGrArArUrCrGrArArA |
| TRBC1 | | A4 | rGrArUrUrCrUrUrArArUrArAr |
| | | | GrGrCrArUrCrCrUrUrCrCrGrA |
| | | | rUrGrCrUrGrArCrUrUrCrUrCr |
| | | | ArCrCrGrUrCrCrGrUrUrUrUrC |
| | | | rCrArArUrArGrGrArGrCrGrGr |
| | | | GrCrGrGrUrArUrGrU*mU*mU*m |
| | | | U |
| MG3-6/3- | 236 | MG3- | mU*mG*mC*rArArGrUrUrArUrC |
| 4 sgRNA | | 6/3- | rUrUrCrUrGrArGrGrCrArCrGr |
| targeting | 4 | TRBC1 | UrUrGrArGrArArUrCrGrArArA |
| TRBC1 | | B4 | rGrArUrUrCrUrUrArArUrArAr |
| | | | GrGrCrArUrCrCrUrUrCrCrGrA |
| | | | rUrGrCrUrGrArCrUrUrCrUrCr |
| | | | ArCrCrGrUrCrCrGrUrUrUrUrC |
| | | | rCrArArUrArGrGrArGrCrGrGr |
| | | | GrCrGrGrUrArUrGrU*mU*mU*m |
| | | | U |
| MG3-6/3- | 237 | MG3- | mA*mG*mU*rUrArUrCrUrUrCrU |
| 4 sgRNA | | 6/3- | rGrArGrGrCrArCrCrUrGrArGr |
| targeting | 4 | TRBC1 | UrUrGrArGrArArUrCrGrArArA |
| TRBC1 | | C4 | rGrArUrUrCrUrUrArArUrArAr |
| | | | GrGrCrArUrCrCrUrUrCrCrGrA |
| | | | rUrGrCrUrGrArCrUrUrCrUrCr |
| | | | ArCrCrGrUrCrCrGrUrUrUrUrC |
| | | | rCrArArUrArGrGrArGrCrGrGr |
| | | | GrCrGrGrUrArUrGrU*mU*mU*m |
| | | | U |
| MG3-6/3- | 238 | MG3- | mG*mU*mU*rArUrCrUrUrCrUrG |
| 4 sgRNA | | 6/3-4 | rArGrGrCrArCrCrUrGrArArGr |
| targeting | | TRBC1 | UrUrGrArGrArArUrCrGrArArA |
| TRBC1 | | D4 | rGrArUrUrCrUrUrArArUrArAr |
| | | | GrGrCrArUrCrCrUrUrCrCrGrA |
| | | | rUrGrCrUrGrArCrUrUrCrUrCr |
| | | | ArCrCrGrUrCrCrGrUrUrUrUrC |
| | | | rCrArArUrArGrGrArGrCrGrGr |
| | | | GrCrGrGrUrArUrGrU*mU*mU*m |
| | | | U |
| MG3-6/3- | 239 | MG3- | mUmC*mA*rArGrArArCrCrArUr |
| 4 sgRNA | | 6/3- | GrArGrArGrArGrGrGrArGrGrU |
| targeting | 4 | TRBC1 | rUrGrArGrArArUrCrGrArArAr |
| TRBC1 | | E4 | GrArUrUrCrUrUrArArUrArArG |
| | | | rGrCrArUrCrCrUrUrCrCrGrAr |
| | | | UrGrCrUrGrArCrUrUrCrUrCrA |
| | | | rCrCrGrUrCrCrGrUrUrUrUrCr |
| | | | CrArArUrArGrGrArGrCrGrGrG |
| | | | rCrGrGrUrArUrGrU*mU*mU*mU |
| MG3-6/3- | 240 | MG3- | mC*mA*mA*rGrArArCrCrArUrG |
| 4 sgRNA | | 6/3- | rArGrArGrArGrGrGrArGrArGr |
| targeting | 4 | TRBC1 | UrUrGrArGrArArUrCrGrArArA |
| TRBC1 | | F4 | rGrArUrUrCrUrUrArArUrArAr |
| | | | GrGrCrArUrCrCrUrUrCrCrGrA |
| | | | rUrGrCrUrGrArCrUrUrCrUrCr |
| | | | ArCrCrGrUrCrCrGrUrUrUrUrC |
| | | | rCrArArUrArGrGrArGrCrGrGr |
| | | | GrCrGrGrUrArUrGrU*mU*mU*m |
| | | | U |
| MG3-6/3- | 241 | MG3- | mU*mU*mA*rCrCrCrGrArGrGrU |
| 4 sgRNA | | 6/3-4 | rArArArGrCrCrArCrArGrUrGr |
| targeting | | TRBC1 | UrUrGrArGrArArUrCrGrArArA |
| TRBC1 | | G4 | rGrArUrUrCrUrUrArArUrArAr |
| | | | GrGrCrArUrCrCrUrUrCrCrGrA |
| | | | rUrGrCrUrGrArCrUrUrCrUrCr |
| | | | ArCrCrGrUrCrCrGrUrUrUrUrC |
| | | | rCrArArUrArGrGrArGrCrGrGr |
| | | | GrCrGrGrUrArUrGrU*mU*mU*m |
| | | | U |
| MG3-6/3- | 242 | MG3- | mC*mC*mG*rArGrGrUrArArArG |
| 4 sgRNA | | 6/3- | rCrCrArCrArGrUrCrUrGrArGr |
| targeting | 4 | TRBC1 | UrUrGrArGrArArUrCrGrArArA |
| TRBC1 | | H4 | rGrArUrUrCrUrUrArArUrArAr |
| | | | GrGrCrArUrCrCrUrUrCrCrGrA |
| | | | rUrGrCrUrGrArCrUrUrCrUrCr |
| | | | ArCrCrGrUrCrCrGrUrUrUrUrC |
| | | | rCrArArUrArGrGrArGrCrGrGr |
| | | | GrCrGrGrUrArUrGrU*mU*mU*m |
| | | | U |
| MG3-6/3- | 243 | MG3- | mC*mA*mG*rUrCrUrGrArArArG |
| 4 sgRNA | | 6/3- | rArArArGrCrArGrGrGrArGrGr |
| targeting | 4 | TRBC1 | UrUrGrArGrArArUrCrGrArArA |
| TRBC1 | | A5 | rGrArUrUrCrUrUrArArUrArAr |
| | | | GrGrCrArUrCrCrUrUrCrCrGrA |
| | | | rUrGrCrUrGrArCrUrUrCrUrCr |
| | | | ArCrCrGrUrCrCrGrUrUrUrUrC |
| | | | rCrArArUrArGrGrArGrCrGrGr |
| | | | GrCrGrGrUrArUrGrU*mU*mU*m |
| | | | U |
| MG3-6/3- | 244 | MG3- | mA*mG*mU*rCrUrGrArArArGrA |
| 4 sgRNA | | 6/3- | rArArGrCrArGrGrGrArGrArGr |
| targeting | 4 | TRBC1 | UrUrGrArGrArArUrCrGrArArA |
| TRBC1 | | B5 | rGrArUrUrCrUrUrArArUrArAr |
| | | | GrGrCrArUrCrCrUrUrCrCrGrA |
| | | | rUrGrCrUrGrArCrUrUrCrUrCr |
| | | | ArCrCrGrUrCrCrGrUrUrUrUrC |
| | | | rCrArArUrArGrGrArGrCrGrGr |
| | | | GrCrGrGrUrArUrGrU*mU*mU*m |
| | | | U |
| MG3-6/3- | 245 | MG3- | mG*mU*mC*rUrGrArArArGrArA |
| 4 sgRNA | | 6/3-4 | rArGrCrArGrGrGrArGrArGrGr |
| targeting | | TRBC1 | UrUrGrArGrArArUrCrGrArArA |
| TRBC1 | | C5 | rGrArUrUrCrUrUrArArUrArAr |
| | | | GrGrCrArUrCrCrUrUrCrCrGrA |
| | | | rUrGrCrUrGrArCrUrUrCrUrCr |
| | | | ArCrCrGrUrCrCrGrUrUrUrUrC |
| | | | rCrArArUrArGrGrArGrCrGrGr |
| | | | GrCrGrGrUrArUrGrU*mU*mU*m |
| | | | U |
| MG3-6/3- | 246 | MG3- | mG*mA*mA*rArGrArArArGrCrA |
| 4 sgRNA | | 6/3- | rGrGrGrArGrArGrGrArArArGr |
| targeting | 4 | TRBC1 | UrUrGrArGrArArUrCrGrArArA |
| TRBC1 | | D5 | rGrArUrUrCrUrUrArArUrArAr |
| | | | GrGrCrArUrCrCrUrUrCrCrGrA |
| | | | rUrGrCrUrGrArCrUrUrCrUrCr |
| | | | ArCrCrGrUrCrCrGrUrUrUrUrC |
| | | | rCrArArUrArGrGrArGrCrGrGr |
| | | | GrCrGrGrUrArUrGrU*mU*mU*m |
| | | | U |
| MG3-6/3- | 247 | MG3- | mG*mA*mG*rArCrCrUrUrArUrU |
| 4 sgRNA | | 6/3-4 | rUrUrCrArUrArGrGrCrArArGr |
| targeting | | TRBC1 | UrUrGrArGrArArUrCrGrArArA |
| TRBC1 | | E5 | rGrArUrUrCrUrUrArArUrArAr |
| | | | GrGrCrArUrCrCrUrUrCrCrGrA |
| | | | rUrGrCrUrGrArCrUrUrCrUrCr |
| | | | ArCrCrGrUrCrCrGrUrUrUrUrC |
| | | | rCrArArUrArGrGrArGrCrGrGr |
| | | | GrCrGrGrUrArUrGrU*mU*mU*m |
| | | | U |
| MG3-6/3- | 248 | MG3- | mG*mA*mU*rGrArGrArGrUrUrA |
| 4 sgRNA | | 6/3- | rCrArCrArGrGrCrCrArCrArGr |
| targeting | 4 | TRBC1 | UrUrGrArGrArArUrCrGrArArA |
| TRBC1 | | F5 | rGrArUrUrCrUrUrArArUrArAr |
| | | | GrGrCrArUrCrCrUrUrCrCrGrA |
| | | | rUrGrCrUrGrArCrUrUrCrUrCr |
| | | | ArCrCrGrUrCrCrGrUrUrUrUrC |
| | | | rCrArArUrArGrGrArGrCrGrGr |
| | | | GrCrGrGrUrArUrGrU*mU*mU*m |
| | | | U |
| MG3-6/3- | 249 | MG3- | mA*mG*mC*rUrGrCrUrUrGrGrC |
| 4 sgRNA | | 6/3- | rUrCrUrGrUrUrGrGrGrCrUrGr |
| targeting | 4 | TRBC1 | UrUrGrArGrArArUrCrGrArArA |
| TRBC1 | | G5 | rGrArUrUrCrUrUrArArUrArAr |
| | | | GrGrCrArUrCrCrUrUrCrCrGrA |
| | | | rUrGrCrUrGrArCrUrUrCrUrCr |
| | | | ArCrCrGrUrCrCrGrUrUrUrUrC |
| | | | rCrArArUrArGrGrArGrCrGrGr |
| | | | GrCrGrGrUrArUrGrU*mU*mU*m |
| | | | U |
| MG3-6/3- | 250 | MG3- | mU*mG*mU*rUrGrGrGrCrUrGrA |
| 4 sgRNA | | 6/3- | rGrArArUrCrUrGrGrGrArGrGr |
| targeting | 4 | TRBC1 | UrUrGrArGrArArUrCrGrArArA |
| TRBC1 | | H5 | rGrArUrUrCrUrUrArArUrArAr |
| | | | GrGrCrArUrCrCrUrUrCrCrGrA |
| | | | rUrGrCrUrGrArCrUrUrCrUrCr |
| | | | ArCrCrGrUrCrCrGrUrUrUrUrC |
| | | | rCrArArUrArGrGrArGrCrGrGr |
| | | | GrCrGrGrUrArUrGrU*mU*mU*m |
| | | | U |
| MG3-6/3- | 251 | MG3- | mG*mG*mA*rArCrArCrCrUrUrG |
| 4 sgRNA | | 6/3- | rUrUrCrArGrGrUrCrCrUrCrGr |
| targeting | 4 | TRBC1 | UrUrGrArGrArArUrCrGrArArA |
| TRBC1 | | A6 | rGrArUrUrCrUrUrArArUrArAr |
| | | | GrGrCrArUrCrCrUrUrCrCrGrA |
| | | | rUrGrCrUrGrArCrUrUrCrUrCr |
| | | | ArCrCrGrUrCrCrGrUrUrUrUrC |
| | | | rCrArArUrArGrGrArGrCrGrGr |
| | | | GrCrGrGrUrArUrGrU*mU*mU*m |
| | | | U |
| DNA | 252 | MG3- | CAGAAGCAGAGATCTCCCACAC |
| sequence | | 6/3-4 | |
| of | | TRBC1 | |
| TRBC1 | | A1 | |
| target | | | |
| site | | | |
| DNA | 253 | MG3- | CCACGTGGAGCTGAGCTGGTGG |
| sequence | | 6/3-4 | |
| of | | TRBC1 | |
| TRBC1 | | B1 | |
| target | | | |
| site | | | |
| DNA | 254 | MG3- | AGTCCAGTTCTACGGGCTCTCG |
| sequence | | 6/3-4 | |
| of | | TRBC1 | |
| TRBC1 | | C1 | |
| target | | | |
| site | | | |
| DNA | 255 | MG3- | GATTAGGTGAGACCAGCTACCA |
| sequence | | 6/3-4 | |
| of | | TRBC1 | |
| TRBC1 | | D1 | |
| target | | | |
| site | | | |
| DNA | 256 | MG3- | ATTAGGTGAGACCAGCTACCAG |
| sequence | | 6/3-4 | |
| of | | TRBC1 | |
| TRBC1 | | E1 | |
| target | | | |
| site | | | |
| DNA | 257 | MG3- | TTAGGTGAGACCAGCTACCAGG |
| sequence | | 6/3-4 | |
| of | | TRBC1 | |
| TRBC1 | | F1 | |
| target | | | |
| site | | | |
| DNA | 258 | MG3- | TGAGACCAGCTACCAGGGAAAA |
| sequence | | 6/3-4 | |
| of | | TRBC1 | |
| TRBC1 | | G1 | |
| target | | | |
| site | | | |
| DNA | 259 | MG3- | CAGGTAGCAGACAAGACTAGAT |
| sequence | | 6/3-4 | |
| of | | TRBC1 | |
| TRBC1 | | H1 | |
| target | | | |
| site | | | |
| DNA | 260 | MG3- | AGGTAGCAGACAAGACTAGATC |
| sequence | | 6/3-4 | |
| of | | TRBC1 | |
| TRBC1 | | A2 | |
| target | | | |
| site | | | |
| DNA | 261 | MG3- | AGCAGACAAGACTAGATCCAAA |
| sequence | | 6/3-4 | |
| of | | TRBC1 | |
| TRBC1 | | B2 | |
| target | | | |
| site | | | |
| DNA | 262 | MG3- | GGAACCAGCGCACACCATGAAG |
| sequence | | 6/3-4 | |
| of | | TRBC1 | |
| TRBC1 | | C2 | |
| target | | | |
| site | | | |
| DNA | 263 | MG3- | GTGGCTGACATCTGCATGGCAG |
| sequence | | 6/3-4 | |
| of | | TRBC1 | |
| TRBC1 | | D2 | |
| target | | | |
| site | | | |
| DNA | 264 | MG3- | GGCCTGGGAGTCTGTGCCAACT |
| sequence | | 6/3-4 | |
| of | | TRBC1 | |
| TRBC1 | | E2 | |
| target | | | |
| site | | | |
| DNA | 265 | MG3- | CTGACTTTACTTTTAATTGCCT |
| sequence | | 6/3-4 | |
| of | | TRBC1 | |
| TRBC1 | | F2 | |
| target | | | |
| site | | | |
| DNA | 266 | MG3- | TGACTTTACTTTTAATTGCCTA |
| sequence | | 6/3-4 | |
| of | | TRBC1 | |
| TRBC1 | | G2 | |
| target | | | |
| site | | | |
| DNA | 267 | MG3- | GACTTTACTTTTAATTGCCTAT |
| sequence | | 6/3-4 | |
| of | | TRBC1 | |
| TRBC1 | | H2 | |
| target | | | |
| site | | | |
| DNA | 268 | MG3- | GGGAAGGAGAAGCTGGAGTCAC |
| sequence | | 6/3-4 | |
| of | | TRBC1 | |
| TRBC1 | | A3 | |
| target | | | |
| site | | | |
| DNA | 269 | MG3- | GGAAGGAGAAGCTGGAGTCACC |
| sequence | | 6/3-4 | |
| of | | TRBC1 | |
| TRBC1 | | B3 | |
| target | | | |
| site | | | |
| DNA | 270 | MG3- | AACTCCTGGCTCTTAATAACCC |
| sequence | | 6/3-4 | |
| of | | TRBC1 | |
| TRBC1 | | C3 | |
| target | | | |
| site | | | |
| DNA | 271 | MG3- | AACTTTCTCTTCTGCAGGTCAA |
| sequence | | 6/3-4 | |
| of | | TRBC1 | |
| TRBC1 | | D3 | |
| target | | | |
| site | | | |
| DNA | 272 | MG3- | ACTCCACTTCCAGGGCTGCCTT |
| sequence | | 6/3-4 | |
| of | | TRBC1 | |
| TRBC1 | | E3 | |
| target | | | |
| site | | | |
| DNA | 273 | MG3- | CTCCACTTCCAGGGCTGCCTTC |
| sequence | | 6/3-4 | |
| of | | TRBC1 | |
| TRBC1 | | F3 | |
| target | | | |
| site | | | |
| DNA | 274 | MG3- | TCCTTTCTCTTGACCTGCAGAA |
| sequence | | 6/3-4 | |
| of | | TRBC1 | |
| TRBC1 | | G3 | |
| target | | | |
| site | | | |
| DNA | 275 | MG3- | AGCCAGGAGTTGTGAGGATTGA |
| sequence | | 6/3-4 | |
| of | | TRBC1 | |
| TRBC1 | | H3 | |
| target | | | |
| site | | | |
| DNA | 276 | MG3- | AGTAGTAGGGCCCATTGACCAC |
| sequence | | 6/3-4 | |
| of | | TRBC1 | |
| TRBC1 | | A4 | |
| target | | | |
| site | | | |
| DNA | 277 | MG3- | TGCAAGTTATCTTCTGAGGCAC |
| sequence | | 6/3-4 | |
| of | | TRBC1 | |
| TRBC1 | | B4 | |
| target | | | |
| site | | | |
| DNA | 278 | MG3- | AGTTATCTTCTGAGGCACCTGA |
| sequence | | 6/3-4 | |
| of | | TRBC1 | |
| TRBC1 | | C4 | |
| target | | | |
| site | | | |
| DNA | 279 | MG3- | GTTATCTTCTGAGGCACCTGAA |
| sequence | | 6/3-4 | |
| of | | TRBC1 | |
| TRBC1 | | D4 | |
| target | | | |
| site | | | |
| DNA | 280 | MG3- | TCAAGAACCATGAGAGAGGGAG |
| sequence | | 6/3-4 | |
| of | | TRBC1 | |
| TRBC1 | | E4 | |
| target | | | |
| site | | | |
| DNA | 281 | MG3- | CAAGAACCATGAGAGAGGGAGA |
| sequence | | 6/3-4 | |
| of | | TRBC1 | |
| TRBC1 | | F4 | |
| target | | | |
| site | | | |
| DNA | 282 | MG3- | TTACCCGAGGTAAAGCCACAGT |
| sequence | | 6/3-4 | |
| of | | TRBC1 | |
| TRBC1 | | G4 | |
| target | | | |
| site | | | |
| DNA | 283 | MG3- | CCGAGGTAAAGCCACAGTCTGA |
| sequence | | 6/3-4 | |
| of | | TRBC1 | |
| TRBC1 | | H4 | |
| target | | | |
| site | | | |
| DNA | 284 | MG3- | CAGTCTGAAAGAAAGCAGGGAG |
| sequence | | 6/3-4 | |
| of | | TRBC1 | |
| TRBC1 | | A5 | |
| target | | | |
| site | | | |
| DNA | 285 | MG3- | AGTCTGAAAGAAAGCAGGGAGA |
| sequence | | 6/3-4 | |
| of | | TRBC1 | |
| TRBC1 | | B5 | |
| target | | | |
| site | | | |
| DNA | 286 | MG3- | GTCTGAAAGAAAGCAGGGAGAG |
| sequence | | 6/3-4 | |
| of | | TRBC1 | |
| TRBC1 | | C5 | |
| target | | | |
| site | | | |
| DNA | 287 | MG3- | GAAAGAAAGCAGGGAGAGGAAA |
| sequence | | 6/3-4 | |
| of | | TRBC1 | |
| TRBC1 | | D5 | |
| target | | | |
| site | | | |
| DNA | 288 | MG3- | GAGACCTTATTTTCATAGGCAA |
| sequence | | 6/3-4 | |
| of | | TRBC1 | |
| TRBC1 | | E5 | |
| target | | | |
| site | | | |
| DNA | 289 | MG3- | GATGAGAGTTACACAGGCCACA |
| sequence | | 6/3-4 | |
| of | | TRBC1 | |
| TRBC1 | | F5 | |
| target | | | |
| site | | | |
| DNA | 290 | MG3- | AGCTGCTTGGCTCTGTTGGGCT |
| sequence | | 6/3-4 | |
| of | | TRBC1 | |
| TRBC1 | | G5 | |
| target | | | |
| site | | | |
| DNA | 291 | MG3- | TGTTGGGCTGAGAATCTGGGAG |
| sequence | | 6/3-4 | |
| of | | TRBC1 | |
| TRBC1 | | H5 | |
| target | | | |
| site | | | |
| DNA | 292 | MG3- | GGAACACCTTGTTCAGGTCCTC |
| sequence | | 6/3-4 | |
| of | | TRBC1 | |
| TRBC1 | | A6 | |
| target | | | |
| site | | | |
| MG3-6/3- | 293 | MG3- | mA*mC*mC*rUrCrUrUrCrCrCrU |
| 4 sgRNA | | 6/3-4 | rUrUrCrCrArGrArGrGrArCrGr |
| targeting | | TRBC2 | UrUrGrArGrArArUrCrGrArArA |
| TRBC2 | | A1 | rGrArUrUrCrUrUrArArUrArAr |
| | | | GrGrCrArUrCrCrUrUrCrCrGrA |
| | | | rUrGrCrUrGrArCrUrUrCrUrCr |
| | | | ArCrCrGrUrCrCrGrUrUrUrUrC |
| | | | rCrArArUrArGrGrArGrCrGrGr |
| | | | GrCrGrGrUrArUrGrU*mU*mU*m |
| | | | U |
| MG3-6/3- | 294 | MG3- | mC*mC*mU*rCrUrUrCrCrCrUrU |
| 4 sgRNA | | 6/3-4 | rUrCrCrArGrArGrGrArCrCrGr |
| targeting | | TRBC2 | UrUrGrArGrArArUrCrGrArArA |
| TRBC2 | | B1 | rGrArUrUrCrUrUrArArUrArAr |
| | | | GrGrCrArUrCrCrUrUrCrCrGrA |
| | | | rUrGrCrUrGrArCrUrUrCrUrCr |
| | | | ArCrCrGrUrCrCrGrUrUrUrUrC |
| | | | rCrArArUrArGrGrArGrCrGrGr |
| | | | GrCrGrGrUrArUrGrU*mU*mU*m |
| | | | U |
| MG3-6/3- | 295 | MG3- | mC*mU*mC*rUrUrCrCrCrUrUrU |
| 4 sgRNA | | 6/3-4 | rCrCrArGrArGrGrArCrCrUrGr |
| targeting | | TRBC2 | UrUrGrArGrArArUrCrGrArArA |
| TRBC2 | | C1 | rGrArUrUrCrUrUrArArUrArAr |
| | | | GrGrCrArUrCrCrUrUrCrCrGrA |
| | | | rUrGrCrUrGrArCrUrUrCrUrCr |
| | | | ArCrCrGrUrCrCrGrUrUrUrUrC |
| | | | rCrArArUrArGrGrArGrCrGrGr |
| | | | GrCrGrGrUrArUrGrU*mU*mU*m |
| | | | U |
| MG3-6/3- | 296 | MG3- | mC*mA*mG*rArArGrCrArGrArG |
| 4 sgRNA | | 6/3-4 | rArUrCrUrCrCrCrArCrArCrGr |
| targeting | | TRBC2 | UrUrGrArGrArArUrCrGrArArA |
| TRBC2 | | D1 | rGrArUrUrCrUrUrArArUrArAr |
| | | | GrGrCrArUrCrCrUrUrCrCrGrA |
| | | | rUrGrCrUrGrArCrUrUrCrUrCr |
| | | | ArCrCrGrUrCrCrGrUrUrUrUrC |
| | | | rCrArArUrArGrGrArGrCrGrGr |
| | | | GrCrGrGrUrArUrGrU*mU*mU*m |
| | | | U |
| MG3-6/3- | 297 | MG3- | mC*mC*mA*rCrGrUrGrGrArGrC |
| 4 sgRNA | | 6/3-4 | rUrGrArGrCrUrGrGrUrGrGrGr |
| targeting | | TRBC2 | UrUrGrArGrArArUrCrGrArArA |
| TRBC2 | | E1 | rGrArUrUrCrUrUrArArUrArAr |
| | | | GrGrCrArUrCrCrUrUrCrCrGrA |
| | | | rUrGrCrUrGrArCrUrUrCrUrCr |
| | | | ArCrCrGrUrCrCrGrUrUrUrUrC |
| | | | rCrArArUrArGrGrArGrCrGrGr |
| | | | GrCrGrGrUrArUrGrU*mU*mU*m |
| | | | U |
| MG3-6/3- | 298 | MG3- | mA*mG*mU*rCrCrArGrUrUrCrU |
| 4 sgRNA | | 6/3-4 | rArCrGrGrGrCrUrCrUrCrGrGr |
| targeting | | TRBC2 | UrUrGrArGrArArUrCrGrArArA |
| TRBC2 | | F1 | rGrArUrUrCrUrUrArArUrArAr |
| | | | GrGrCrArUrCrCrUrUrCrCrGrA |
| | | | rUrGrCrUrGrArCrUrUrCrUrCr |
| | | | ArCrCrGrUrCrCrGrUrUrUrUrC |
| | | | rCrArArUrArGrGrArGrCrGrGr |
| | | | GrCrGrGrUrArUrGrU*mU*mU*m |
| | | | U |
| MG3-6/3 | 299 | MG3- | mG*mA*mU*rUrArGrGrUrGrArG |
| 4 sgRNA | | 6/3-4 | rArCrCrArGrCrUrArCrCrArGr |
| targeting | | TRBC2 | UrUrGrArGrArArUrCrGrArArA |
| TRBC2 | | G1 | rGrArUrUrCrUrUrArArUrArAr |
| | | | GrGrCrArUrCrCrUrUrCrCrGrA |
| | | | rUrGrCrUrGrArCrUrUrCrUrCr |
| | | | ArCrCrGrUrCrCrGrUrUrUrUrC |
| | | | rCrArArUrArGrGrArGrCrGrGr |
| | | | GrCrGrGrUrArUrGrU*mU*mU*m |
| | | | U |
| MG3-6/3- | 300 | MG3- | mA*mU*mU*rArGrGrUrGrArGrA |
| 4 sgRNA | | 6/3-4 | rCrCrArGrCrUrArCrCrArGrGr |
| targeting | | TRBC2 | UrUrGrArGrArArUrCrGrArArA |
| TRBC2 | | H1 | rGrArUrUrCrUrUrArArUrArAr |
| | | | GrGrCrArUrCrCrUrUrCrCrGrA |
| | | | rUrGrCrUrGrArCrUrUrCrUrCr |
| | | | ArCrCrGrUrCrCrGrUrUrUrUrC |
| | | | rCrArArUrArGrGrArGrCrGrGr |
| | | | GrCrGrGrUrArUrGrU*mU*mU*m |
| | | | U |
| MG3-6/3- | 301 | MG3- | mU*mU*mA*rGrGrUrGrArGrArC |
| 4 sgRNA | | 6/3-4 | rCrArGrCrUrArCrCrArGrGrGr |
| targeting | | TRBC2 | UrUrGrArGrArArUrCrGrArArA |
| TRBC2 | | A2 | rGrArUrUrCrUrUrArArUrArAr |
| | | | GrGrCrArUrCrCrUrUrCrCrGrA |
| | | | rUrGrCrUrGrArCrUrUrCrUrCr |
| | | | ArCrCrGrUrCrCrGrUrUrUrUrC |
| | | | rCrArArUrArGrGrArGrCrGrGr |
| | | | GrCrGrGrUrArUrGrU*mU*mU*m |
| | | | U |
| MG3-6/3- | 302 | MG3- | mUmG*mA*rGrArCrCrArGrCrUr |
| 4 sgRNA | | 6/3-4 | ArCrCrArGrGrGrArArArArGrU |
| targeting | | TRBC2 | rUrGrArGrArArUrCrGrArArAr |
| TRBC2 | | B2 | GrArUrUrCrUrUrArArUrArArG |
| | | | rGrCrArUrCrCrUrUrCrCrGrAr |
| | | | UrGrCrUrGrArCrUrUrCrUrCrA |
| | | | rCrCrGrUrCrCrGrUrUrUrUrCr |
| | | | CrArArUrArGrGrArGrCrGrGrG |
| | | | rCrGrGrUrArUrGrU*mU*mU*mU |
| MG3-6/3- | 303 | MG3- | mU*mA*mG*rCrGrGrArCrArArG |
| 4 sgRNA | | 6/3-4 | rArCrUrArGrArUrCrCrArGrGr |
| targeting | | TRBC2 | UrUrGrArGrArArUrCrGrArArA |
| TRBC2 | | C2 | rGrArUrUrCrUrUrArArUrArAr |
| | | | GrGrCrArUrCrCrUrUrCrCrGrA |
| | | | rUrGrCrUrGrArCrUrUrCrUrCr |
| | | | ArCrCrGrUrCrCrGrUrUrUrUrC |
| | | | rCrArArUrArGrGrArGrCrGrGr |
| | | | GrCrGrGrUrArUrGrU*mU*mU*m |
| | | | U |
| MG3-6/3- | 304 | MG3- | mC*mC*mC*rCrCrArCrCrArArG |
| 4 sgRNA | | 6/3-4 | rArArGrCrArUrArGrArGrGrGr |
| targeting | | TRBC2 | UrUrGrArGrArArUrCrGrArArA |
| TRBC2 | | D2 | rGrArUrUrCrUrUrArArUrArAr |
| | | | GrGrCrArUrCrCrUrUrCrCrGrA |
| | | | rUrGrCrUrGrArCrUrUrCrUrCr |
| | | | ArCrCrGrUrCrCrGrUrUrUrUrC |
| | | | rCrArArUrArGrGrArGrCrGrGr |
| | | | GrCrGrGrUrArUrGrU*mU*mU*m |
| | | | U |
| MG3-6/3- | 305 | MG3- | mUmC*mU*rGrCrUrCrUrCrGrAr |
| 4 sgRNA | | 6/3-4 | ArCrCrArGrGrGrCrArUrGrGrU |
| targeting | | TRBC2 | rUrGrArGrArArUrCrGrArArAr |
| TRBC2 | | E2 | GrArUrUrCrUrUrArArUrArArG |
| | | | rGrCrArUrCrCrUrUrCrCrGrAr |
| | | | UrGrCrUrGrArCrUrUrCrUrCrA |
| | | | rCrCrGrUrCrCrGrUrUrUrUrCr |
| | | | CrArArUrArGrGrArGrCrGrGrG |
| | | | rCrGrGrUrArUrGrU*mU*mU*mU |
| MG3-6/3- | 306 | MG3- | mG*mG*mA*rArCrArUrCrArCrA |
| 4 sgRNA | | 6/3-4 | rCrArUrGrGrGrCrArUrArArGr |
| targeting | | TRBC2 | UrUrGrArGrArArUrCrGrArArA |
| TRBC2 | | F2 | rGrArUrUrCrUrUrArArUrArAr |
| | | | GrGrCrArUrCrCrUrUrCrCrGrA |
| | | | rUrGrCrUrGrArCrUrUrCrUrCr |
| | | | ArCrCrGrUrCrCrGrUrUrUrUrC |
| | | | rCrArArUrArGrGrArGrCrGrGr |
| | | | GrCrGrGrUrArUrGrU*mU*mU*m |
| | | | U |
| MG3-6/3- | 307 | MG3- | mC*mC*mU*rArArUrArUrArUrC |
| 4 sgRNA | | 6/3-4 | rCrUrArUrCrArCrCrUrCrArGr |
| targeting | | TRBC2 | UrUrGrArGrArArUrCrGrArArA |
| TRBC2 | | G2 | rGrArUrUrCrUrUrArArUrArAr |
| | | | GrGrCrArUrCrCrUrUrCrCrGrA |
| | | | rUrGrCrUrGrArCrUrUrCrUrCr |
| | | | ArCrCrGrUrCrCrGrUrUrUrUrC |
| | | | rCrArArUrArGrGrArGrCrGrGr |
| | | | GrCrGrGrUrArUrGrU*mU*mU*m |
| | | | U |
| MG3-6/3- | 308 | MG3- | mA*mC*mC*rArUrArArUrGrArA |
| 4 sgRNA | | 6/3-4 | rGrCrCrArGrArCrUrGrGrGrGr |
| targeting | | TRBC2 | UrUrGrArGrArArUrCrGrArArA |
| TRBC2 | | H2 | rGrArUrUrCrUrUrArArUrArAr |
| | | | GrGrCrArUrCrCrUrUrCrCrGrA |
| | | | rUrGrCrUrGrArCrUrUrCrUrCr |
| | | | ArCrCrGrUrCrCrGrUrUrUrUrC |
| | | | rCrArArUrArGrGrArGrCrGrGr |
| | | | GrCrGrGrUrArUrGrU*mU*mU*m |
| | | | U |
| MG3-6/3- | 309 | MG3- | mC*mC*mA*rUrArArUrGrArArG |
| 4 sgRNA | | 6/3-4 | rCrCrArGrArCrUrGrGrGrGrGr |
| targeting | | TRBC2 | UrUrGrArGrArArUrCrGrArArA |
| TRBC2 | | A3 | rGrArUrUrCrUrUrArArUrArAr |
| | | | GrGrCrArUrCrCrUrUrCrCrGrA |
| | | | rUrGrCrUrGrArCrUrUrCrUrCr |
| | | | ArCrCrGrUrCrCrGrUrUrUrUrC |
| | | | rCrArArUrArGrGrArGrCrGrGr |
| | | | GrCrGrGrUrArUrGrU*mU*mU*m |
| | | | U |
| MG3-6/3- | 310 | MG3- | mC*mA*mU*rArArUrGrArArGrC |
| 4 sgRNA | | 6/3-4 | rCrArGrArCrUrGrGrGrGrArGr |
| targeting | | TRBC2 | UrUrGrArGrArArUrCrGrArArA |
| TRBC2 | | B3 | rGrArUrUrCrUrUrArArUrArAr |
| | | | GrGrCrArUrCrCrUrUrCrCrGrA |
| | | | rUrGrCrUrGrArCrUrUrCrUrCr |
| | | | ArCrCrGrUrCrCrGrUrUrUrUrC |
| | | | rCrArArUrArGrGrArGrCrGrGr |
| | | | GrCrGrGrUrArUrGrU*mU*mU*m |
| | | | U |
| MG3-6/3- | 311 | MG3- | mG*mC*mC*rArGrArCrUrGrGrG |
| 4 sgRNA | | 6/3-4 | rGrArGrArArArArUrGrCrArGr |
| targeting | | TRBC2 | UrUrGrArGrArArUrCrGrArArA |
| TRBC2 | | C3 | rGrArUrUrCrUrUrArArUrArAr |
| | | | GrGrCrArUrCrCrUrUrCrCrGrA |
| | | | rUrGrCrUrGrArCrUrUrCrUrCr |
| | | | ArCrCrGrUrCrCrGrUrUrUrUrC |
| | | | rCrArArUrArGrGrArGrCrGrGr |
| | | | GrCrGrGrUrArUrGrU*mU*mU*m |
| | | | U |
| MG3-6/3- | 312 | MG3- | mG*mG*mA*rGrArArArArUrGrC |
| 4 sgRNA | | 6/3-4 | rArGrGrGrArArUrArUrCrArGr |
| targeting | | TRBC2 | UrUrGrArGrArArUrCrGrArArA |
| TRBC2 | | D3 | rGrArUrUrCrUrUrArArUrArAr |
| | | | GrGrCrArUrCrCrUrUrCrCrGrA |
| | | | rUrGrCrUrGrArCrUrUrCrUrCr |
| | | | ArCrCrGrUrCrCrGrUrUrUrUrC |
| | | | rCrArArUrArGrGrArGrCrGrGr |
| | | | GrCrGrGrUrArUrGrU*mU*mU*m |
| | | | U |
| MG3-6/3- | 313 | MG3- | mG*mG*mA*rGrArCrArArCrCrA |
| 4 sgRNA | | 6/3-4 | rGrCrGrArGrCrCrCrUrArCrGr |
| targeting | | TRBC2 | UrUrGrArGrArArUrCrGrArArA |
| TRBC2 | | E3 | rGrArUrUrCrUrUrArArUrArAr |
| | | | GrGrCrArUrCrCrUrUrCrCrGrA |
| | | | rUrGrCrUrGrArCrUrUrCrUrCr |
| | | | ArCrCrGrUrCrCrGrUrUrUrUrC |
| | | | rCrArArUrArGrGrArGrCrGrGr |
| | | | GrCrGrGrUrArUrGrU*mU*mU*m |
| | | | U |
| MG3-6/3- | 314 | MG3- | mU*mA*mC*rUrCrCrUrGrCrUrG |
| 4 sgRNA | | 6/3-4 | rUrGrCrCrArUrArGrCrCrCrGr |
| targeting | | TRBC2 | UrUrGrArGrArArUrCrGrArArA |
| TRBC2 | | F3 | rGrArUrUrCrUrUrArArUrArAr |
| | | | GrGrCrArUrCrCrUrUrCrCrGrA |
| | | | rUrGrCrUrGrArCrUrUrCrUrCr |
| | | | ArCrCrGrUrCrCrGrUrUrUrUrC |
| | | | rCrArArUrArGrGrArGrCrGrGr |
| | | | GrCrGrGrUrArUrGrU*mU*mU*m |
| | | | U |
| MG3-6/3- | 315 | MG3- | mC*mU*mG*rUrGrCrCrArUrArG |
| 4 sgRNA | | 6/3-4 | rCrCrCrCrUrGrArArArCrCrGr |
| targeting | | TRBC2 | UrUrGrArGrArArUrCrGrArArA |
| TRBC2 | | G3 | rGrArUrUrCrUrUrArArUrArAr |
| | | | GrGrCrArUrCrCrUrUrCrCrGrA |
| | | | rUrGrCrUrGrArCrUrUrCrUrCr |
| | | | ArCrCrGrUrCrCrGrUrUrUrUrC |
| | | | rCrArArUrArGrGrArGrCrGrGr |
| | | | GrCrGrGrUrArUrGrU*mU*mU*m |
| | | | U |
| MG3-6/3- | 316 | MG3- | mU*mG*mU*rGrCrCrArUrArGrC |
| 4 sgRNA | | 6/3-4 | rCrCrCrUrGrArArArCrCrCrGr |
| targeting | | TRBC2 | UrUrGrArGrArArUrCrGrArArA |
| TRBC2 | | H3 | rGrArUrUrCrUrUrArArUrArAr |
| | | | GrGrCrArUrCrCrUrUrCrCrGrA |
| | | | rUrGrCrUrGrArCrUrUrCrUrCr |
| | | | ArCrCrGrUrCrCrGrUrUrUrUrC |
| | | | rCrArArUrArGrGrArGrCrGrGr |
| | | | GrCrGrGrUrArUrGrU*mU*mU*m |
| | | | U |
| MG3-6/3- | 317 | MG3- | mG*mU*mG*rCrCrArUrArGrCrC |
| 4 sgRNA | | 6/3-4 | rCrCrUrGrArArArCrCrCrUrGr |
| targeting | | TRBC2 | UrUrGrArGrArArUrCrGrArArA |
| TRBC2 | | A4 | rGrArUrUrCrUrUrArArUrArAr |
| | | | GrGrCrArUrCrCrUrUrCrCrGrA |
| | | | rUrGrCrUrGrArCrUrUrCrUrCr |
| | | | ArCrCrGrUrCrCrGrUrUrUrUrC |
| | | | rCrArArUrArGrGrArGrCrGrGr |
| | | | GrCrGrGrUrArUrGrU*mU*mU*m |
| | | | U |
| MG3-6/3- | 318 | MG3- | mU*mG*mU*rUrCrUrCrUrCrUrU |
| 4 sgRNA | | 6/3-4 | rCrCrArCrArGrGrUrCrArArGr |
| targeting | | TRBC2 | UrUrGrArGrArArUrCrGrArArA |
| TRBC2 | | B4 | rGrArUrUrCrUrUrArArUrArAr |
| | | | GrGrCrArUrCrCrUrUrCrCrGrA |
| | | | rUrGrCrUrGrArCrUrUrCrUrCr |
| | | | ArCrCrGrUrCrCrGrUrUrUrUrC |
| | | | rCrArArUrArGrGrArGrCrGrGr |
| | | | GrCrGrGrUrArUrGrU*mU*mU*m |
| | | | U |
| MG3-6/3- | 319 | MG3- | mG*mA*mA*rArGrGrArUrUrCrC |
| 4 sgRNA | | 6/3-4 | rArGrArGrGrCrUrArGrCrUrGr |
| targeting | | TRBC2 | UrUrGrArGrArArUrCrGrArArA |
| TRBC2 | | C4 | rGrArUrUrCrUrUrArArUrArAr |
| | | | GrGrCrArUrCrCrUrUrCrCrGrA |
| | | | rUrGrCrUrGrArCrUrUrCrUrCr |
| | | | ArCrCrGrUrCrCrGrUrUrUrUrC |
| | | | rCrArArUrArGrGrArGrCrGrGr |
| | | | GrCrGrGrUrArUrGrU*mU*mU*m |
| | | | U |
| MG3-6/3- | 320 | MG3- | mG*mG*mA*rUrGrGrUrUrUrUrG |
| 4 sgRNA | | 6/3-4 | rGrArGrCrUrArGrCrCrUrCrGr |
| targeting | | TRBC2 | UrUrGrArGrArArUrCrGrArArA |
| TRBC2 | | D4 | rGrArUrUrCrUrUrArArUrArAr |
| | | | GrGrCrArUrCrCrUrUrCrCrGrA |
| | | | rUrGrCrUrGrArCrUrUrCrUrCr |
| | | | ArCrCrGrUrCrCrGrUrUrUrUrC |
| | | | rCrArArUrArGrGrArGrCrGrGr |
| | | | GrCrGrGrUrArUrGrU*mU*mU*m |
| | | | U |
| MG3-6/3- | 321 | MG3- | mC*mC*mC*rUrGrGrUrUrCrGrA |
| 4 sgRNA | | 6/3-4 | rGrArGrCrArGrArGrArCrGrGr |
| targeting | | TRBC2 | UrUrGrArGrArArUrCrGrArArA |
| TRBC2 | | E4 | rGrArUrUrCrUrUrArArUrArAr |
| | | | GrGrCrArUrCrCrUrUrCrCrGrA |
| | | | rUrGrCrUrGrArCrUrUrCrUrCr |
| | | | ArCrCrGrU |
| | | | rCrCrGrUrUrUrUrCrCrArArUr |
| | | | ArGrGrArGrCrGrGrGrCrGrGrU |
| | | | rArUrGrU*mU*mU*mU |
| MG3-6/3- | 322 | MG3- | mA*mG*mC*rArGrArGrArCrGrG |
| 4 sgRNA | | 6/3-4 | rCrGrArArArGrArUrArGrArGr |
| targeting | | TRBC2 | UrUrGrArGrArArUrCrGrArArA |
| TRBC2 | | F4 | rGrArUrUrCrUrUrArArUrArAr |
| | | | GrGrCrArUrCrCrUrUrCrCrGrA |
| | | | rUrGrCrUrGrArCrUrUrCrUrCr |
| | | | ArCrCrGrUrCrCrGrUrUrUrUrC |
| | | | rCrArArUrArGrGrArGrCrGrGr |
| | | | GrCrGrGrUrArUrGrU*mU*mU*m |
| | | | U |
| MG3-6/3- | 323 | MG3- | mG*mC*mA*rGrArGrArCrGrGrC |
| 4 sgRNA | | 6/3-4 | rGrArArArGrArUrArGrArGrGr |
| targeting | | TRBC2 | UrUrGrArGrArArUrCrGrArArA |
| TRBC2 | | G4 | rGrArUrUrCrUrUrArArUrArAr |
| | | | GrGrCrArUrCrCrUrUrCrCrGrA |
| | | | rUrGrCrUrGrArCrUrUrCrUrCr |
| | | | ArCrCrGrUrCrCrGrUrUrUrUrC |
| | | | rCrArArUrArGrGrArGrCrGrGr |
| | | | GrCrGrGrUrArUrGrU*mU*mU*m |
| | | | U |
| MG3-6/3- | 324 | MG3- | mC*mA*mG*rArGrArCrGrGrCrG |
| 4 sgRNA | | 6/3-4 | rArArArGrArUrArGrArGrArGr |
| targeting | | TRBC2 | UrUrGrArGrArArUrCrGrArArA |
| TRBC2 | | H4 | rGrArUrUrCrUrUrArArUrArAr |
| | | | GrGrCrArUrCrCrUrUrCrCrGrA |
| | | | rUrGrCrUrGrArCrUrUrCrUrCr |
| | | | ArCrCrGrUrCrCrGrUrUrUrUrC |
| | | | rCrArArUrArGrGrArGrCrGrGr |
| | | | GrCrGrGrUrArUrGrU*mU*mU*m |
| | | | U |
| MG3-6/3- | 325 | MG3- | mU*mU*mA*rCrCrGrGrArGrGrU |
| 4 sgRNA | | 6/3-4 | rGrArArGrCrCrArCrArGrUrGr |
| targeting | | TRBC2 | UrUrGrArGrArArUrCrGrArArA |
| TRBC2 | | A5 | rGrArUrUrCrUrUrArArUrArAr |
| | | | GrGrCrArUrCrCrUrUrCrCrGrA |
| | | | rUrGrCrUrGrArCrUrUrCrUrCr |
| | | | ArCrCrGrUrCrCrGrUrUrUrUrC |
| | | | rCrArArUrArGrGrArGrCrGrGr |
| | | | GrCrGrGrUrArUrGrU*mU*mU*m |
| | | | U |
| MG3-6/3- | 326 | MG3- | mC*mG*mG*rArGrGrUrGrArArG |
| 4 sgRNA | | 6/3-4 | rCrCrArCrArGrUrCrUrGrArGr |
| targeting | | TRBC2 | UrUrGrArGrArArUrCrGrArArA |
| TRBC2 | | B5 | rGrArUrUrCrUrUrArArUrArAr |
| | | | GrGrCrArUrCrCrUrUrCrCrGrA |
| | | | rUrGrCrUrGrArCrUrUrCrUrCr |
| | | | ArCrCrGrUrCrCrGrUrUrUrUrC |
| | | | rCrArArUrArGrGrArGrCrGrGr |
| | | | GrCrGrGrUrArUrGrU*mU*mU*m |
| | | | U |
| MG3-6/3- | 327 | MG3- | mG*mG*mA*rGrGrUrGrArArGrC |
| 4 sgRNA | | 6/3-4 | rCrArCrArGrUrCrUrGrArArGr |
| targeting | | TRBC2 | UrUrGrArGrArArUrCrGrArArA |
| TRBC2 | | C5 | rGrArUrUrCrUrUrArArUrArAr |
| | | | GrGrCrArUrCrCrUrUrCrCrGrA |
| | | | rUrGrCrUrGrArCrUrUrCrUrCr |
| | | | ArCrCrGrUrCrCrGrUrUrUrUrC |
| | | | rCrArArUrArGrGrArGrCrGrGr |
| | | | GrCrGrGrUrArUrGrU*mU*mU*m |
| | | | U |
| MG3-6/3- | 328 | MG3- | mA*mC*mA*rGrUrCrUrGrArArA |
| 4 sgRNA | | 6/3-4 | rGrArArArArCrArGrGrGrGrGr |
| targeting | | TRBC2 | UrUrGrArGrArArUrCrGrArArA |
| TRBC2 | | D5 | rGrArUrUrCrUrUrArArUrArAr |
| | | | GrGrCrArUrCrCrUrUrCrCrGrA |
| | | | rUrGrCrUrGrArCrUrUrCrUrCr |
| | | | ArCrCrGrUrCrCrGrUrUrUrUrC |
| | | | rCrArArUrArGrGrArGrCrGrGr |
| | | | GrCrGrGrUrArUrGrU*mU*mU*m |
| | | | U |
| MG3-6/3- | 329 | MG3- | mC*mA*mG*rUrCrUrGrArArArG |
| 4 sgRNA | | 6/3-4 | rArArArArCrArGrGrGrGrArGr |
| targeting | | TRBC2 | UrUrGrArGrArArUrCrGrArArA |
| TRBC2 | | E5 | rGrArUrUrCrUrUrArArUrArAr |
| | | | GrGrCrArUrCrCrUrUrCrCrGrA |
| | | | rUrGrCrUrGrArCrUrUrCrUrCr |
| | | | ArCrCrGrUrCrCrGrUrUrUrUrC |
| | | | rCrArArUrArGrGrArGrCrGrGr |
| | | | GrCrGrGrUrArUrGrU*mU*mU*m |
| | | | U |
| MG3-6/3- | 330 | MG3- | mA*mG*mU*rCrUrGrArArArGrA |
| 4 sgRNA | | 6/3-4 | rArArArCrArGrGrGrGrArArGr |
| targeting | | TRBC2 | UrUrGrArGrArArUrCrGrArArA |
| TRBC2 | | F5 | rGrArUrUrCrUrUrArArUrArAr |
| | | | GrGrCrArUrCrCrUrUrCrCrGrA |
| | | | rUrGrCrUrGrArCrUrUrCrUrCr |
| | | | ArCrCrGrUrCrCrGrUrUrUrUrC |
| | | | rCrArArUrArGrGrArGrCrGrGr |
| | | | GrCrGrGrUrArUrGrU*mU*mU*m |
| | | | U |
| MG3-6/3- | 331 | MG3- | mG*mU*mC*rUrGrArArArGrArA |
| 4 sgRNA | | 6/3-4 | rArArCrArGrGrGrGrArArGrGr |
| targeting | | TRBC2 | UrUrGrArGrArArUrCrGrArArA |
| TRBC2 | | G5 | rGrArUrUrCrUrUrArArUrArAr |
| | | | GrGrCrArUrCrCrUrUrCrCrGrA |
| | | | rUrGrCrUrGrArCrUrUrCrUrCr |
| | | | ArCrCrGrUrCrCrGrUrUrUrUrC |
| | | | rCrArArUrArGrGrArGrCrGrGr |
| | | | GrCrGrGrUrArUrGrU*mU*mU*m |
| | | | U |
| MG3-6/3- | 332 | MG3- | mA*mC*mA*rGrGrGrGrArArGrA |
| 4 sgRNA | | 6/3-4 | rArArArArUrGrGrArUrGrArGr |
| targeting | | TRBC2 | UrUrGrArGrArArUrCrGrArArA |
| TRBC2 | | H5 | rGrArUrUrCrUrUrArArUrArAr |
| | | | GrGrCrArUrCrCrUrUrCrCrGrA |
| | | | rUrGrCrUrGrArCrUrUrCrUrCr |
| | | | ArCrCrGrUrCrCrGrUrUrUrUrC |
| | | | rCrArArUrArGrGrArGrCrGrGr |
| | | | GrCrGrGrUrArUrGrU*mU*mU*m |
| | | | U |
| MG3-6/3- | 333 | MG3- | mG*mC*mG*rArArGrUrGrGrUrC |
| 4 sgRNA | | 6/3-4 | rArCrUrArUrGrArUrCrUrUrGr |
| targeting | | TRBC2 | UrUrGrArGrArArUrCrGrArArA |
| TRBC2 | | A6 | rGrArUrUrCrUrUrArArUrArAr |
| | | | GrGrCrArUrCrCrUrUrCrCrGrA |
| | | | rUrGrCrUrGrArCrUrUrCrUrCr |
| | | | ArCrCrGrUrCrCrGrUrUrUrUrC |
| | | | rCrArArUrArGrGrArGrCrGrGr |
| | | | GrCrGrGrUrArUrGrU*mU*mU*m |
| | | | U |
| MG3-6/3- | 334 | MG3- | mUmUmA*rGrGrArArArCrCrArG |
| 4 sgRNA | | 6/3-4 | rGrArCrCrCrCrArGrArArGrUr |
| targeting | | TRBC2 | UrGrArGrArArUrCrGrArArArG |
| TRBC2 | | B6 | rArUrUrCrUrUrArArUrArArGr |
| | | | GrCrArUrCrCrUrUrCrCrGrArU |
| | | | rGrCrUrGrArCrUrUrCrUrCrAr |
| | | | CrCrGrUrCrCrGrUrUrUrUrCrC |
| | | | rArArUrArGrGrArGrCrGrGrGr |
| | | | CrGrGrUrArUrGrU*mU*mU*mU |
| MG3-6/3- | 335 | MG3- | mU*mA*mU*rGrGrCrUrGrGrUrC |
| 4 sgRNA | | 6/3-4 | rCrUrCrArGrGrGrArGrArCrGr |
| targeting | | TRBC2 | UrUrGrArGrArArUrCrGrArArA |
| TRBC2 | | C6 | rGrArUrUrCrUrUrArArUrArAr |
| | | | GrGrCrArUrCrCrUrUrCrCrGrA |
| | | | rUrGrCrUrGrArCrUrUrCrUrCr |
| | | | ArCrCrGrUrCrCrGrUrUrUrUrC |
| | | | rCrArArUrArGrGrArGrCrGrGr |
| | | | GrCrGrGrUrArUrGrU*mU*mU*m |
| | | | U |
| MG3-6/3- | 336 | MG3- | mC*mU*mA*rArGrGrUrGrUrCrA |
| 4 sgRNA | | 6/3-4 | rGrGrArUrCrUrGrArArGrGrGr |
| targeting | | TRBC2 | UrUrGrArGrArArUrCrGrArArA |
| TRBC2 | | D6 | rGrArUrUrCrUrUrArArUrArAr |
| | | | GrGrCrArUrCrCrUrUrCrCrGrA |
| | | | rUrGrCrUrGrArCrUrUrCrUrCr |
| | | | ArCrCrGrUrCrCrGrUrUrUrUrC |
| | | | rCrArArUrArGrGrArGrCrGrGr |
| | | | GrCrGrGrUrArUrGrU*mU*mU*m |
| | | | U |
| MG3-6/3- | 337 | MG3- | mG*mG*mA*rArCrArCrGrUrUrU |
| 4 sgRNA | | 6/3-4 | rUrUrCrArGrGrUrCrCrUrCrGr |
| targeting | | TRBC2 | UrUrGrArGrArArUrCrGrArArA |
| TRBC2 | | E6 | rGrArUrUrCrUrUrArArUrArAr |
| | | | GrGrCrArUrCrCrUrUrCrCrGrA |
| | | | rUrGrCrUrGrArCrUrUrCrUrCr |
| | | | ArCrCrGrUrCrCrGrUrUrUrUrC |
| | | | rCrArArUrArGrGrArGrCrGrGr |
| | | | GrCrGrGrUrArUrGrU*mU*mU*m |
| | | | U |
| DNA | 338 | MG3- | ACCTCTTCCCTTTCCAGAGGAC |
| sequence | | 6/3-4 | |
| of | | TRBC2 | |
| TRBC2 | | A1 | |
| target | | | |
| site | | | |
| DNA | 339 | MG3- | CCTCTTCCCTTTCCAGAGGACC |
| sequence | | 6/3-4 | |
| of | | TRBC2 | |
| TRBC2 | | B1 | |
| target | | | |
| site | | | |
| DNA | 340 | MG3- | CTCTTCCCTTTCCAGAGGACCT |
| sequence | | 6/3-4 | |
| of | | TRBC2 | |
| TRBC2 | | C1 | |
| target | | | |
| site | | | |
| DNA | 341 | MG3- | CAGAAGCAGAGATCTCCCACAC |
| sequence | | 6/3-4 | |
| of | | TRBC2 | |
| TRBC2 | | D1 | |
| target | | | |
| site | | | |
| DNA | 342 | MG3- | CCACGTGGAGCTGAGCTGGTGG |
| sequence | | 6/3-4 | |
| of | | TRBC2 | |
| TRBC2 | | E1 | |
| target | | | |
| site | | | |
| DNA | 343 | MG3- | AGTCCAGTTCTACGGGCTCTCG |
| sequence | | 6/3-4 | |
| of | | TRBC2 | |
| TRBC2 | | F1 | |
| target | | | |
| site | | | |
| DNA | 344 | MG3- | GATTAGGTGAGACCAGCTACCA |
| sequence | | 6/3-4 | |
| of | | TRBC2 | |
| TRBC2 | | G1 | |
| target | | | |
| site | | | |
| DNA | 345 | MG3- | ATTAGGTGAGACCAGCTACCAG |
| sequence | | 6/3-4 | |
| of | | TRBC2 | |
| TRBC2 | | H1 | |
| target | | | |
| site | | | |
| DNA | 346 | MG3- | TTAGGTGAGACCAGCTACCAGG |
| sequence | | 6/3-4 | |
| of | | TRBC2 | |
| TRBC2 | | A2 | |
| target | | | |
| site | | | |
| DNA | 347 | MG3- | TGAGACCAGCTACCAGGGAAAA |
| sequence | | 6/3-4 | |
| of | | TRBC2 | |
| TRBC2 | | B2 | |
| target | | | |
| site | | | |
| DNA | 348 | MG3- | TAGCGGACAAGACTAGATCCAG |
| sequence | | 6/3-4 | |
| of | | TRBC2 | |
| TRBC2 | | C2 | |
| target | | | |
| site | | | |
| DNA | 349 | MG3- | CCCCCACCAAGAAGCATAGAGG |
| sequence | | 6/3-4 | |
| of | | TRBC2 | |
| TRBC2 | | D2 | |
| target | | | |
| site | | | |
| DNA | 350 | MG3- | TCTGCTCTCGAACCAGGGCATG |
| sequence | | 6/3-4 | |
| of | | TRBC2 | |
| TRBC2 | | E2 | |
| target | | | |
| site | | | |
| DNA | 351 | MG3- | GGAACATCACACATGGGCATAA |
| sequence | | 6/3-4 | |
| of | | TRBC2 | |
| TRBC2 | | F2 | |
| target | | | |
| site | | | |
| DNA | 352 | MG3- | CCTAATATATCCTATCACCTCA |
| sequence | | 6/3-4 | |
| of | | TRBC2 | |
| TRBC2 | | G2 | |
| target | | | |
| site | | | |
| DNA | 353 | MG3- | ACCATAATGAAGCCAGACTGGG |
| sequence | | 6/3-4 | |
| of | | TRBC2 | |
| TRBC2 | | H2 | |
| target | | | |
| site | | | |
| DNA | 354 | MG3- | CCATAATGAAGCCAGACTGGGG |
| sequence | | 6/3-4 | |
| of | | TRBC2 | |
| TRBC2 | | A3 | |
| target | | | |
| site | | | |
| DNA | 355 | MG3- | CATAATGAAGCCAGACTGGGGA |
| sequence | | 6/3-4 | |
| of | | TRBC2 | |
| TRBC2 | | B3 | |
| target | | | |
| site | | | |
| DNA | 356 | MG3- | GCCAGACTGGGGAGAAAATGCA |
| sequence | | 6/3-4 | |
| of | | TRBC2 | |
| TRBC2 | | C3 | |
| target | | | |
| site | | | |
| DNA | 357 | MG3- | GGAGAAAATGCAGGGAATATCA |
| sequence | | 6/3-4 | |
| of | | TRBC2 | |
| TRBC2 | | D3 | |
| target | | | |
| site | | | |
| DNA | 358 | MG3- | GGAGACAACCAGCGAGCCCTAC |
| sequence | | 6/3-4 | |
| of | | TRBC2 | |
| TRBC2 | | E3 | |
| target | | | |
| site | | | |
| DNA | 359 | MG3- | TACTCCTGCTGTGCCATAGCCC |
| sequence | | 6/3-4 | |
| of | | TRBC2 | |
| TRBC2 | | F3 | |
| target | | | |
| site | | | |
| DNA | 360 | MG3- | CTGTGCCATAGCCCCTGAAACC |
| sequence | | 6/3-4 | |
| of | | TRBC2 | |
| TRBC2 | | G3 | |
| target | | | |
| site | | | |
| DNA | 361 | MG3- | TGTGCCATAGCCCCTGAAACCC |
| sequence | | 6/3-4 | |
| of | | TRBC2 | |
| TRBC2 | | H3 | |
| target | | | |
| site | | | |
| DNA | 362 | MG3- | GTGCCATAGCCCCTGAAACCCT |
| sequence | | 6/3-4 | |
| of | | TRBC2 | |
| TRBC2 | | A4 | |
| target | | | |
| site | | | |
| DNA | 363 | MG3- | TGTTCTCTCTTCCACAGGTCAA |
| sequence | | 6/3-4 | |
| of | | TRBC2 | |
| TRBC2 | | B4 | |
| target | | | |
| site | | | |
| DNA | 364 | MG3- | GAAAGGATTCCAGAGGCTAGCT |
| sequence | | 6/3-4 | |
| of | | TRBC2 | |
| TRBC2 | | C4 | |
| target | | | |
| site | | | |
| DNA | 365 | MG3- | GGATGGTTTTGGAGCTAGCCTC |
| sequence | | 6/3-4 | |
| of | | TRBC2 | |
| TRBC2 | | D4 | |
| target | | | |
| site | | | |
| DNA | 366 | MG3- | CCCTGGTTCGAGAGCAGAGACG |
| sequence | | 6/3-4 | |
| of | | TRBC2 | |
| TRBC2 | | E4 | |
| target | | | |
| site | | | |
| DNA | 367 | MG3- | AGCAGAGACGGCGAAAGATAGA |
| sequence | | 6/3-4 | |
| of | | TRBC2 | |
| TRBC2 | | F4 | |
| target | | | |
| site | | | |
| DNA | 368 | MG3- | GCAGAGACGGCGAAAGATAGAG |
| sequence | | 6/3-4 | |
| of | | TRBC2 | |
| TRBC2 | | G4 | |
| target | | | |
| site | | | |
| DNA | 369 | MG3- | CAGAGACGGCGAAAGATAGAGA |
| sequence | | 6/3-4 | |
| of | | TRBC2 | |
| TRBC2 | | H4 | |
| target | | | |
| site | | | |
| DNA | 370 | MG3- | TTACCGGAGGTGAAGCCACAGT |
| sequence | | 6/3-4 | |
| of | | TRBC2 | |
| TRBC2 | | A5 | |
| target | | | |
| site | | | |
| DNA | 371 | MG3- | CGGAGGTGAAGCCACAGTCTGA |
| sequence | | 6/3-4 | |
| of | | TRBC2 | |
| TRBC2 | | B5 | |
| target | | | |
| site | | | |
| DNA | 372 | MG3- | GGAGGTGAAGCCACAGTCTGAA |
| sequence | | 6/3-4 | |
| of | | TRBC2 | |
| TRBC2 | | C5 | |
| target | | | |
| site | | | |
| DNA | 373 | MG3- | ACAGTCTGAAAGAAAACAGGGG |
| sequence | | 6/3-4 | |
| of | | TRBC2 | |
| TRBC2 | | D5 | |
| target | | | |
| site | | | |
| DNA | 374 | MG3- | CAGTCTGAAAGAAAACAGGGGA |
| sequence | | 6/3-4 | |
| of | | TRBC2 | |
| TRBC2 | | E5 | |
| target | | | |
| site | | | |
| DNA | 375 | MG3- | AGTCTGAAAGAAAACAGGGGAA |
| sequence | | 6/3-4 | |
| of | | TRBC2 | |
| TRBC2 | | F5 | |
| target | | | |
| site | | | |
| DNA | 376 | MG3- | GTCTGAAAGAAAACAGGGGAAG |
| sequence | | 6/3-4 | |
| of | | TRBC2 | |
| TRBC2 | | G5 | |
| target | | | |
| site | | | |
| DNA | 377 | MG3- | ACAGGGGAAGAAAAATGGATGA |
| sequence | | 6/3-4 | |
| of | | TRBC2 | |
| TRBC2 | | H5 | |
| target | | | |
| site | | | |
| DNA | 378 | MG3- | GCGAAGTGGTCACTATGATCTT |
| sequence | | 6/3-4 | |
| of | | TRBC2 | |
| TRBC2 | | A6 | |
| target | | | |
| site | | | |
| DNA | 379 | MG3- | TTAGGAAACCAGGACCCCAGAA |
| sequence | | 6/3-4 | |
| of | | TRBC2 | |
| TRBC2 | | B6 | |
| target | | | |
| site | | | |
| DNA | 380 | MG3- | TATGGCTGGTCCTCAGGGAGAC |
| sequence | | 6/3-4 | |
| of | | TRBC2 | |
| TRBC2 | | C6 | |
| target | | | |
| site | | | |
| DNA | 381 | MG3- | CTAAGGTGTCAGGATCTGAAGG |
| sequence | | 6/3-4 | |
| of | | TRBC2 | |
| TRBC2 | | D6 | |
| target | | | |
| site | | | |
| DNA | 382 | MG3- | GGAACACGTTTTTCAGGTCCTC |
| sequence | | 6/3-4 | |
| of | | TRBC2 | |
| TRBC2 | | E6 | |
| target | | | |
| site | | | |

(r = native ribose base, m = 2'-O methyl modified base, F = 2' Fluro modified base, * = phosphorothioate bond)

### Example 16—Analysis of Gene-Editing Outcomes at the DNA Level for ANGPTL3 in Hep3B Cells

[0402] Nucleofection of MG3-6/4 RNPs (104 pmol protein/120 pmol guide) comprising sgRNAs described below in Table 9D below and SEQ ID NOs: 383-572 was performed into Hep3B cells (100,000) using electroporation. Cells were harvested and genomic DNA prepared three days post-transfection. PCR primers appropriate for use in NGS-based DNA sequencing were generated, optimized, and used to amplify the individual target sequences for each guide RNA. The amplicons were sequenced and analyzed determine gene editing (FIG. 21). The results show that sgRNA E5, C6, A7, A8, A9, G9, G10, Eli, A12, and C12 are the highest performing sgRNAs in this assay.

TABLE 9D
gRNAs and Targeting Sequences Used in Example 16

| | SEQ | | |
|---|---|---|---|
| | ID | | |
| Category | NO: | Name | Sequence |
| MG3-6/3- | 383 | MG3- | mU*mU*mG*rUrUrCrCrUrCrUrArGrUrUrArUrUrUrCrCrUrCrGrUrU |
| 4 sgRNA | | 6/3-4 | rGrArGrArArUrCrGrArArArGrArUrUrCrUrUrArArUrArArGrGrCr |
| targeting | | ANGPTL3 | ArUrCrCrUrUrCrCrGrArUrGrCrUrGrArCrUrUrCrUrCrArCrCrGrU |
| ANGPTL3 | | A1 | rCrCrGrUrUrUrUrCrCrArArUrArGrGrArGrCrGrGrGrCrGrGrUrAr |
| | | | UrGrU*mU*mU*mU |
| MG3-6/3- | 384 | MG3- | mA*mU*mU*rUrGrArUrUrCrUrCrUrArUrCrUrCrCrArGrArGrGrUrU |
| 4 sgRNA | | 6/3-4 | rGrArGrArArUrCrGrArArArGrArUrUrCrUrUrArArUrArArGrGrCr |
| targeting | | ANGPTL | ArUrCrCrUrUrCrCrGrArUrGrCrUrGrArCrUrUrCrUrCrArCrCrGrU |
| ANGPTL3 | | B1 | rCrCrGrUrUrUrUrCrCrArArUrArGrGrArGrCrGrGrGrCrGrGrUrAr |
| | | | UrGrU*mU*mU*mU |
| MG3-6/3- | 385 | MG3- | mU*mU*mU*rGrArUrUrCrUrCrUrArUrCrUrCrCrArGrArGrCrGrUrU |
| 4 sgRNA | | 6/3-4 | rGrArGrArArUrCrGrArArArGrArUrUrCrUrUrArArUrArArGrGrCr |
| targeting | | ANGPTL3 | ArUrCrCrUrUrCrCrGrArUrGrCrUrGrArCrUrUrCrUrCrArCrCrGrU |
| ANGPTL3 | | C1 | rCrCrGrUrUrUrUrCrCrArArUrArGrGrArGrCrGrGrGrCrGrGrUrAr |
| | | | UrGrU*mU*mU*mU |
| MG3-6/3- | 386 | MG3- | mA*mA*mG*rArUrUrUrGrCrUrArUrGrUrUrArGrArCrGrArUrGrUrU |
| 4 sgRNA | | 6/3-4 | rGrArGrArArUrCrGrArArArGrArUrUrCrUrUrArArUrArArGrGrCr |
| targeting | | ANGPTL3 | ArUrCrCrUrUrCrCrGrArUrGrCrUrGrArCrUrUrCrUrCrArCrCrGrU |
| ANGPTL3 | | D1 | rCrCrGrUrUrUrUrCrCrArArUrArGrGrArGrCrGrGrGrCrGrGrUrAr |
| | | | UrGrU*mU*mU*mU |
| MG3-6/3- | 387 | MG3- | mA*mG*mA*rUrUrUrGrCrUrArUrGrUrUrArGrArCrGrArUrGrGrUrU |
| 4 sgRNA | | 6/3-4 | rGrArGrArArUrCrGrArArArGrArUrUrCrUrUrArArUrArArGrGrCr |
| targeting | | ANGPTL3 | ArUrCrCrUrUrCrCrGrArUrGrCrUrGrArCrUrUrCrUrCrArCrCrGrU |
| ANGPTL3 | | E1 | rCrCrGrUrUrUrUrCrCrArArUrArGrGrArGrCrGrGrGrCrGrGrUrAr |
| | | | UrGrU*mU*mU*mU |
| MG3-6/3 | 388 | MG3- | mG*mA*mU*rUrUrGrCrUrArUrGrUrUrArGrArCrGrArUrGrUrGrUrU |
| 4 sgRNA | | 6/3-4 | rGrArGrArArUrCrGrArArArGrArUrUrCrUrUrArArUrArArGrGrCr |
| targeting | | ANGPTL3 | ArUrCrCrUrUrCrCrGrArUrGrCrUrGrArCrUrUrCrUrCrArCrCrGrU |
| ANGPTL3 | | F1 | rCrCrGrUrUrUrUrCrCrArArUrArGrGrArGrCrGrGrGrCrGrGrUrAr |
| | | | UrGrU*mU*mU*mU |
| MG3-6/3- | 389 | MG3- | mA*mC*mU*rUrUrGrUrCrCrArUrArArGrArCrGrArArGrGrGrGrUrU |
| 4 sgRNA | | 6/3-4 | rGrArGrArArUrCrGrArArArGrArUrUrCrUrUrArArUrArArGrGrCr |
| targeting | | ANGPTL3 | ArUrCrCrUrUrCrCrGrArUrGrCrUrGrArCrUrUrCrUrCrArCrCrGrU |
| ANGPTL3 | | G1 | rCrCrGrUrUrUrUrCrCrArArUrArGrGrArGrCrGrGrGrCrGrGrUrAr |
| | | | UrGrU*mU*mU*mU |
| MG3-6/3- | 390 | MG3- | mA*mG*mG*rGrCrCrArArArUrUrArArUrGrArCrArUrArUrUrGrUrU |
| 4 sgRNA | | 6/3-4 | rGrArGrArArUrCrGrArArArGrArUrUrCrUrUrArArUrArArGrGrCr |
| targeting | | ANGPTL3 | ArUrCrCrUrUrCrCrGrArUrGrCrUrGrArCrUrUrCrUrCrArCrCrGrU |
| ANGPTL3 | | H1 | rCrCrGrUrUrUrUrCrCrArArUrArGrGrArGrCrGrGrGrCrGrGrUrAr |
| | | | UrGrU*mU*mU*mU |
| MG3-6/3- | 391 | MG3- | mG*mG*mG*rCrCrArArArUrUrArArUrGrArCrArUrArUrUrUrGrUrU |
| 4 sgRNA | | 6/3-4 | rGrArGrArArUrCrGrArArArGrArUrUrCrUrUrArArUrArArGrGrCr |
| targeting | | ANGPTL3 | ArUrCrCrUrUrCrCrGrArUrGrCrUrGrArCrUrUrCrUrCrArCrCrGrU |
| ANGPTL3 | | A2 | rCrCrGrUrUrUrUrCrCrArArUrArGrGrArGrCrGrGrGrCrGrGrUrAr |
| | | | UrGrU*mU*mU*mU |
| MG3-6/3- | 392 | MG3- | mU*mA*mU*rGrArUrCrUrArUrCrGrCrUrGrCrArArArCrCrArGrUrU |
| 4 sgRNA | | 6/3-4 | rGrArGrArArUrCrGrArArArGrArUrUrCrUrUrArArUrArArGrGrCr |
| targeting | | ANGPTL3 | ArUrCrCrUrUrCrCrGrArUrGrCrUrGrArCrUrUrCrUrCrArCrCrGrU |
| ANGPTL3 | | B2 | rCrCrGrUrUrUrUrCrCrArArUrArGrGrArGrCrGrGrGrCrGrGrUrAr |
| | | | UrGrU*mU*mU*mU |
| MG3-6/3- | 393 | MG3- | mA*mU*mG*rArUrCrUrArUrCrGrCrUrGrCrArArArCrCrArGrGrUrU |
| 4 sgRNA | | 6/3-4 | rGrArGrArArUrCrGrArArArGrArUrUrCrUrUrArArUrArArGrGrCr |
| targeting | | ANGPTL3 | ArUrCrCrUrUrCrCrGrArUrGrCrUrGrArCrUrUrCrUrCrArCrCrGrU |
| ANGPTL3 | | C2 | rCrCrGrUrUrUrUrCrCrArArUrArGrGrArGrCrGrGrGrCrGrGrUrAr |
| | | | UrGrU*mU*mU*mU |
| MG3-6/3- | 394 | MG3- | mC*mA*mA*rArCrCrArGrUrGrArArArUrCrArArArGrArArGrGrUrU |
| 4 sgRNA | | 6/3-4 | rGrArGrArArUrCrGrArArArGrArUrUrCrUrUrArArUrArArGrGrCr |
| targeting | | ANGPTL3 | ArUrCrCrUrUrCrCrGrArUrGrCrUrGrArCrUrUrCrUrCrArCrCrGrU |
| ANGPTL3 | | D2 | rCrCrGrUrUrUrUrCrCrArArUrArGrGrArGrCrGrGrGrCrGrGrUrAr |
| | | | UrGrU*mU*mU*mU |
| MG3-6/3- | 395 | MG3- | mA*mA*mA*rCrCrArGrUrGrArArArUrCrArArArGrArArGrArGrUrU |
| 4 sgRNA | | 6/3-4 | rGrArGrArArUrCrGrArArArGrArUrUrCrUrUrArArUrArArGrGrCr |
| targeting | | ANGPTL3 | ArUrCrCrUrUrCrCrGrArUrGrCrUrGrArCrUrUrCrUrCrArCrCrGrU |
| ANGPTL3 | | E2 | rCrCrGrUrUrUrUrCrCrArArUrArGrGrArGrCrGrGrGrCrGrGrUrAr |
| | | | UrGrU*mU*mU*mU |
| MG3-6/3- | 396 | MG3- | mA*mC*mA*rArGrUrCrArArArArArUrGrArArGrArGrGrUrArGrUrU |
| 4 sgRNA | | 6/3-4 | rGrArGrArArUrCrGrArArArGrArUrUrCrUrUrArArUrArArGrGrCr |
| targeting | | ANGPTL3 | ArUrCrCrUrUrCrCrGrArUrGrCrUrGrArCrUrUrCrUrCrArCrCrGrU |
| ANGPTL3 | | F2 | rCrCrGrUrUrUrUrCrCrArArUrArGrGrArGrCrGrGrGrCrGrGrUrAr |
| | | | UrGrU*mU*mU*mU |
| MG3-6/3- | 397 | MG3- | mG*mA*mA*rUrArUrGrUrCrArCrUrUrGrArArCrUrCrArArCrGrUrU |
| 4 sgRNA | | 6/3-4 | rGrArGrArArUrCrGrArArArGrArUrUrCrUrUrArArUrArArGrGrCr |
| targeting | | ANGPTL3 | ArUrCrCrUrUrCrCrGrArUrGrCrUrGrArCrUrUrCrUrCrArCrCrGrU |
| ANGPTL3 | | G2 | rCrCrGrUrUrUrUrCrCrArArUrArGrGrArGrCrGrGrGrCrGrGrUrAr |
| | | | UrGrU*mU*mU*mU |
| MG3-6/3- | 398 | MG3- | mU*mC*mA*rCrUrUrGrArArCrUrCrArArCrUrCrArArArArCrGrUrU |
| 4 sgRNA | | 6/3-4 | rGrArGrArArUrCrGrArArArGrArUrUrCrUrUrArArUrArArGrGrCr |
| targeting | | ANGPTL3 | ArUrCrCrUrUrCrCrGrArUrGrCrUrGrArCrUrUrCrUrCrArCrCrGrU |
| ANGPTL3 | | H2 | rCrCrGrUrUrUrUrCrCrArArUrArGrGrArGrCrGrGrGrCrGrGrUrAr |
| | | | UrGrU*mU*mU*mU |
| MG3-6/3- | 399 | MG3- | mU*mC*mA*rArArArCrUrUrGrArArArGrCrCrUrCrCrUrArGrGrUrU |
| 4 sgRNA | | 6/3-4 | rGrArGrArArUrCrGrArArArGrArUrUrCrUrUrArArUrArArGrGrCr |
| targeting | | ANGPTL3 | ArUrCrCrUrUrCrCrGrArUrGrCrUrGrArCrUrUrCrUrCrArCrCrGrU |
| ANGPTL3 | | A3 | rCrCrGrUrUrUrUrCrCrArArUrArGrGrArGrCrGrGrGrCrGrGrUrAr |
| | | | UrGrU*mU*mU*mU |
| MG3-6/3- | 400 | MG3- | mC*mA*mA*rArArCrUrUrGrArArArGrCrCrUrCrCrUrArGrArGrUrU |
| 4 sgRNA | | 6/3-4 | rGrArGrArArUrCrGrArArArGrArUrUrCrUrUrArArUrArArGrGrCr |
| targeting | | ANGPTL3 | ArUrCrCrUrUrCrCrGrArUrGrCrUrGrArCrUrUrCrUrCrArCrCrGrU |
| ANGPTL3 | | B3 | rCrCrGrUrUrUrUrCrCrArArUrArGrGrArGrCrGrGrGrCrGrGrUrAr |
| | | | UrGrU*mU*mU*mU |
| MG3-6/3- | 401 | MG3- | mA*mA*mA*rArCrUrUrGrArArArGrCrCrUrCrCrUrArGrArArGrUrU |
| 4 sgRNA | | 6/3-4 | rGrArGrArArUrCrGrArArArGrArUrUrCrUrUrArArUrArArGrGrCr |
| targeting | | ANGPTL3 | ArUrCrCrUrUrCrCrGrArUrGrCrUrGrArCrUrUrCrUrCrArCrCrGrU |
| ANGPTL3 | | C3 | rCrCrGrUrUrUrUrCrCrArArUrArGrGrArGrCrGrGrGrCrGrGrUrAr |
| | | | UrGrU*mU*mU*mU |
| MG3-6/3- | 402 | MG3- | mA*mA*mA*rCrUrUrGrArArArGrCrCrUrCrCrUrArGrArArGrGrUrU |
| 4 sgRNA | | 6/3-4 | rGrArGrArArUrCrGrArArArGrArUrUrCrUrUrArArUrArArGrGrCr |
| targeting | | ANGPTL3 | ArUrCrCrUrUrCrCrGrArUrGrCrUrGrArCrUrUrCrUrCrArCrCrGrU |
| ANGPTL3 | | D3 | rCrCrGrUrUrUrUrCrCrArArUrArGrGrArGrCrGrGrGrCrGrGrUrAr |
| | | | UrGrU*mU*mU*mU |
| MG3-6/3- | 403 | MG3- | mA*mA*mC*rUrUrGrArArArGrCrCrUrCrCrUrArGrArArGrArGrUrU |
| 4 sgRNA | | 6/3-4 | rGrArGrArArUrCrGrArArArGrArUrUrCrUrUrArArUrArArGrGrCr |
| targeting | | ANGPTL3 | ArUrCrCrUrUrCrCrGrArUrGrCrUrGrArCrUrUrCrUrCrArCrCrGrU |
| ANGPTL3 | | E3 | rCrCrGrUrUrUrUrCrCrArArUrArGrGrArGrCrGrGrGrCrGrGrUrAr |
| | | | UrGrU*mU*mU*mU |
| MG3-6/3- | 404 | MG3- | mG*mU*mU*rCrUrGrGrArGrUrUrUrCrArGrGrUrUrGrArUrUrGrUrU |
| 4 sgRNA | | 6/3-4 | rGrArGrArArUrCrGrArArArGrArUrUrCrUrUrArArUrArArGrGrCr |
| targeting | | ANGPTL3 | ArUrCrCrUrUrCrCrGrArUrGrCrUrGrArCrUrUrCrUrCrArCrCrGrU |
| ANGPTL3 | | F3 | rCrCrGrUrUrUrUrCrCrArArUrArGrGrArGrCrGrGrGrCrGrGrUrAr |
| | | | UrGrU*mU*mU*mU |
| MG3-6/3- | 405 | MG3- | mC*mA*mC*rUrGrGrUrUrUrGrCrArGrCrGrArUrArGrArUrCrGrUrU |
| 4 sgRNA | | 6/3-4 | rGrArGrArArUrCrGrArArArGrArUrUrCrUrUrArArUrArArGrGrCr |
| targeting | | ANGPTL3 | ArUrCrCrUrUrCrCrGrArUrGrCrUrGrArCrUrUrCrUrCrArCrCrGrU |
| ANGPTL3 | | G3 | rCrCrGrUrUrUrUrCrCrArArUrArGrGrArGrCrGrGrGrCrGrGrUrAr |
| | | | UrGrU*mU*mU*mU |
| MG3-6/3- | 406 | MG3- | mA*mC*mU*rGrGrUrUrUrGrCrArGrCrGrArUrArGrArUrCrArGrUrU |
| 4 sgRNA | | 6/3-4 | rGrArGrArArUrCrGrArArArGrArUrUrCrUrUrArArUrArArGrGrCr |
| targeting | | ANGPTL3 | ArUrCrCrUrUrCrCrGrArUrGrCrUrGrArCrUrUrCrUrCrArCrCrGrU |
| ANGPTL3 | | H3 | rCrCrGrUrUrUrUrCrCrArArUrArGrGrArGrCrGrGrGrCrGrGrUrAr |
| | | | UrGrU*mU*mU*mU |
| MG3-6/3- | 407 | MG3- | mC*mG*mA*rUrArGrArUrCrArUrArArArArArGrArCrUrGrArGrUrU |
| 4 sgRNA | | 6/3-4 | rGrArGrArArUrCrGrArArArGrArUrUrCrUrUrArArUrArArGrGrCr |
| targeting | | ANGPTL3 | ArUrCrCrUrUrCrCrGrArUrGrCrUrGrArCrUrUrCrUrCrArCrCrGrU |
| ANGPTL3 | | A4 | rCrCrGrUrUrUrUrCrCrArArUrArGrGrArGrCrGrGrGrCrGrGrUrAr |
| | | | UrGrU*mU*mU*mU |
| MG3-6/3- | 408 | MG3- | mC*mC*mC*rArArCrUrGrArArGrGrArGrGrCrCrArUrUrGrGrGrUrU |
| 4 sgRNA | | 6/3-4 | rGrArGrArArUrCrGrArArArGrArUrUrCrUrUrArArUrArArGrGrCr |
| targeting | | ANGPTL3 | ArUrCrCrUrUrCrCrGrArUrGrCrUrGrArCrUrUrCrUrCrArCrCrGrU |
| ANGPTL3 | | B4 | rCrCrGrUrUrUrUrCrCrArArUrArGrGrArGrCrGrGrGrCrGrGrUrAr |
| | | | UrGrU*mU*mU*mU |
| MG3-6/3- | 409 | MG3- | mC*mC*mA*rArCrUrGrArArGrGrArGrGrCrCrArUrUrGrGrCrGrUrU |
| 4 sgRNA | | 6/3-4 | rGrArGrArArUrCrGrArArArGrArUrUrCrUrUrArArUrArArGrGrCr |
| targeting | | ANGPTL3 | ArUrCrCrUrUrCrCrGrArUrGrCrUrGrArCrUrUrCrUrCrArCrCrGrU |
| ANGPTL3 | | C4 | rCrCrGrUrUrUrUrCrCrArArUrArGrGrArGrCrGrGrGrCrGrGrUrAr |
| | | | UrGrU*mU*mU*mU |
| MG3-6/3- | 410 | MG3- | mC*mU*mU*rGrArUrUrUrUrGrGrCrUrCrUrGrGrArGrArUrArGrUrU |
| 4 sgRNA | | 6/3-4 | rGrArGrArArUrCrGrArArArGrArUrUrCrUrUrArArUrArArGrGrCr |
| targeting | | ANGPTL3 | ArUrCrCrUrUrCrCrGrArUrGrCrUrGrArCrUrUrCrUrCrArCrCrGrU |
| ANGPTL3 | | D4 | rCrCrGrUrUrUrUrCrCrArArUrArGrGrArGrCrGrGrGrCrGrGrUrAr |
| | | | UrGrU*mU*mU*mU |
| MG3-6/3- | 411 | MG3- | mU*mU*mU*rUrGrGrCrUrCrUrGrGrArGrArUrArGrArGrArArGrUrU |
| 4 sgRNA | | 6/3-4 | rGrArGrArArUrCrGrArArArGrArUrUrCrUrUrArArUrArArGrGrCr |
| targeting | | ANGPTL3 | ArUrCrCrUrUrCrCrGrArUrGrCrUrGrArCrUrUrCrUrCrArCrCrGrU |
| ANGPTL3 | | E4 | rCrCrGrUrUrUrUrCrCrArArUrArGrGrArGrCrGrGrGrCrGrGrUrAr |
| | | | UrGrU*mU*mU*mU |
| MG3-6/3- | 412 | MG3- | mU*mC*mU*rGrGrArGrArUrArGrArGrArArUrCrArArArUrGrGrUrU |
| 4 sgRNA | | 6/3-4 | rGrArGrArArUrCrGrArArArGrArUrUrCrUrUrArArUrArArGrGrCr |
| targeting | | ANGPTL3 | ArUrCrCrUrUrCrCrGrArUrGrCrUrGrArCrUrUrCrUrCrArCrCrGrU |
| ANGPTL3 | | F4 | rCrCrGrUrUrUrUrCrCrArArUrArGrGrArGrCrGrGrGrCrGrGrUrAr |
| | | | UrGrU*mU*mU*mU |
| MG3-6/3- | 413 | MG3- | mG*mA*mA*rUrUrGrUrCrUrUrGrArUrCrArArUrUrCrUrGrGrGrUrU |
| 4 sgRNA | | 6/3-4 | rGrArGrArArUrCrGrArArArGrArUrUrCrUrUrArArUrArArGrGrCr |
| targeting | | ANGPTL3 | ArUrCrCrUrUrCrCrGrArUrGrCrUrGrArCrUrUrCrUrCrArCrCrGrU |
| ANGPTL3 | | G4 | rCrCrGrUrUrUrUrCrCrArArUrArGrGrArGrCrGrGrGrCrGrGrUrAr |
| | | | UrGrU*mU*mU*mU |
| MG3-6/3- | 414 | MG3- | mA*mA*mU*rUrGrUrCrUrUrGrArUrCrArArUrUrCrUrGrGrArGrUrU |
| 4 sgRNA | | 6/3-4 | rGrArGrArArUrCrGrArArArGrArUrUrCrUrUrArArUrArArGrGrCr |
| targeting | | ANGPTL3 | ArUrCrCrUrUrCrCrGrArUrGrCrUrGrArCrUrUrCrUrCrArCrCrGrU |
| ANGPTL3 | | H4 | rCrCrGrUrUrUrUrCrCrArArUrArGrGrArGrCrGrGrGrCrGrGrUrAr |
| | | | UrGrU*mU*mU*mU |
| MG3-6/3- | 415 | MG3- | mG*mG*mA*rGrGrArArArUrArArCrUrArGrArGrGrArArCrArGrUrU |
| 4 sgRNA | | 6/3-4 | rGrArGrArArUrCrGrArArArGrArUrUrCrUrUrArArUrArArGrGrCr |
| targeting | | ANGPTL3 | ArUrCrCrUrUrCrCrGrArUrGrCrUrGrArCrUrUrCrUrCrArCrCrGrU |
| ANGPTL3 | | A5 | rCrCrGrUrUrUrUrCrCrArArUrArGrGrArGrCrGrGrGrCrGrGrUrAr |
| | | | UrGrU*mU*mU*mU |
| MG3-6/3- | 416 | MG3- | mG*mA*mG*rGrArArArUrArArCrUrArGrArGrGrArArCrArArGrUrU |
| 4 sgRNA | | 6/3-4 | rGrArGrArArUrCrGrArArArGrArUrUrCrUrUrArArUrArArGrGrCr |
| targeting | | ANGPTL3 | ArUrCrCrUrUrCrCrGrArUrGrCrUrGrArCrUrUrCrUrCrArCrCrGrU |
| ANGPTL3 | | B5 | rCrCrGrUrUrUrUrCrCrArArUrArGrGrArGrCrGrGrGrCrGrGrUrAr |
| | | | UrGrU*mU*mU*mU |
| MG3-6/3- | 417 | MG3- | mA*mC*mU*rCrUrCrUrArUrArUrCrCrArGrArCrUrUrUrUrGrGrUrU |
| 4 sgRNA | | 6/3-4 | rGrArGrArArUrCrGrArArArGrArUrUrCrUrUrArArUrArArGrGrCr |
| targeting | | ANGPTL3 | ArUrCrCrUrUrCrCrGrArUrGrCrUrGrArCrUrUrCrUrCrArCrCrGrU |
| ANGPTL3 | | C5 | rCrCrGrUrUrUrUrCrCrArArUrArGrGrArGrCrGrGrGrCrGrGrUrAr |
| | | | UrGrU*mU*mU*mU |
| MG3-6/3- | 418 | MG3- | mC*mU*mC*rUrCrUrArUrArUrCrCrArGrArCrUrUrUrUrGrUrGrUrU |
| 4 sgRNA | | 6/3-4 | rGrArGrArArUrCrGrArArArGrArUrUrCrUrUrArArUrArArGrGrCr |
| targeting | | ANGPTL3 | ArUrCrCrUrUrCrCrGrArUrGrCrUrGrArCrUrUrCrUrCrArCrCrGrU |
| ANGPTL3 | | D5 | rCrCrGrUrUrUrUrCrCrArArUrArGrGrArGrCrGrGrGrCrGrGrUrAr |
| | | | UrGrU*mU*mU*mU |
| MG3-6/3- | 419 | MG3- | mU*mC*mU*rCrUrArUrArUrCrCrArGrArCrUrUrUrUrGrUrArGrUrU |
| 4 sgRNA | | 6/3-4 | rGrArGrArArUrCrGrArArArGrArUrUrCrUrUrArArUrArArGrGrCr |
| targeting | | ANGPTL3 | ArUrCrCrUrUrCrCrGrArUrGrCrUrGrArCrUrUrCrUrCrArCrCrGrU |
| ANGPTL3 | | E5 | rCrCrGrUrUrUrUrCrCrArArUrArGrGrArGrCrGrGrGrCrGrGrUrAr |
| | | | UrGrU*mU*mU*mU |
| MG3-6/3- | 420 | MG3- | mA*mA*mC*rArArUrUrArArArCrCrArArCrArGrCrArUrArGrGrUrU |
| 4 sgRNA | | 6/3-4 | rGrArGrArArUrCrGrArArArGrArUrUrCrUrUrArArUrArArGrGrCr |
| targeting | | ANGPTL3 | ArUrCrCrUrUrCrCrGrArUrGrCrUrGrArCrUrUrCrUrCrArCrCrGrU |
| ANGPTL3 | | F5 | rCrCrGrUrUrUrUrCrCrArArUrArGrGrArGrCrGrGrGrCrGrGrUrAr |
| | | | UrGrU*mU*mU*mU |
| MG3-6/3- | 421 | MG3- | mA*mU*mU*rArArArCrCrArArCrArGrCrArUrArGrUrCrArArGrUrU |
| 4 sgRNA | | 6/3-4 | rGrArGrArArUrCrGrArArArGrArUrUrCrUrUrArArUrArArGrGrCr |
| targeting | | ANGPTL3 | ArUrCrCrUrUrCrCrGrArUrGrCrUrGrArCrUrUrCrUrCrArCrCrGrU |
| ANGPTL3 | | G5 | rCrCrGrUrUrUrUrCrCrArArUrArGrGrArGrCrGrGrGrCrGrGrUrAr |
| | | | UrGrU*mU*mU*mU |
| MG3-6/3- | 422 | MG3- | mA*mA*mC*rCrArArCrArGrCrArUrArGrUrCrArArArUrArArGrUrU |
| 4 sgRNA | | 6/3-4 | rGrArGrArArUrCrGrArArArGrArUrUrCrUrUrArArUrArArGrGrCr |
| targeting | | ANGPTL3 | ArUrCrCrUrUrCrCrGrArUrGrCrUrGrArCrUrUrCrUrCrArCrCrGrU |
| ANGPTL3 | | H5 | rCrCrGrUrUrUrUrCrCrArArUrArGrGrArGrCrGrGrGrCrGrGrUrAr |
| | | | UrGrU*mU*mU*mU |
| MG3-6/3- | 423 | MG3- | mA*mC*mC*rArArCrArGrCrArUrArGrUrCrArArArUrArArArGrUrU |
| 4 sgRNA | | 6/3-4 | rGrArGrArArUrCrGrArArArGrArUrUrCrUrUrArArUrArArGrGrCr |
| targeting | | ANGPTL3 | ArUrCrCrUrUrCrCrGrArUrGrCrUrGrArCrUrUrCrUrCrArCrCrGrU |
| ANGPTL3 | | A6 | rCrCrGrUrUrUrUrCrCrArArUrArGrGrArGrCrGrGrGrCrGrGrUrAr |
| | | | UrGrU*mU*mU*mU |
| MG3-6/3- | 424 | MG3- | mG*mA*mU*rGrCrUrArUrUrArUrCrUrUrGrUrUrUrUrUrCrUrGrUrU |
| 4 sgRNA | | 6/3-4 | rGrArGrArArUrCrGrArArArGrArUrUrCrUrUrArArUrArArGrGrCr |
| targeting | | ANGPTL3 | ArUrCrCrUrUrCrCrGrArUrGrCrUrGrArCrUrUrCrUrCrArCrCrGrU |
| ANGPTL3 | | B6 | rCrCrGrUrUrUrUrCrCrArArUrArGrGrArGrCrGrGrGrCrGrGrUrAr |
| | | | UrGrU*mU*mU*mU |
| MG3-6/3- | 425 | MG3- | mA*mG*mG*rArCrUrArGrUrArUrUrCrArArGrArArCrCrCrArGrUrU |
| 4 sgRNA | | 6/3-4 | rGrArGrArArUrCrGrArArArGrArUrUrCrUrUrArArUrArArGrGrCr |
| targeting | | ANGPTL3 | ArUrCrCrUrUrCrCrGrArUrGrCrUrGrArCrUrUrCrUrCrArCrCrGrU |
| ANGPTL3 | | C6 | rCrCrGrUrUrUrUrCrCrArArUrArGrGrArGrCrGrGrGrCrGrGrUrAr |
| | | | UrGrU*mU*mU*mU |
| MG3-6/3- | 426 | MG3- | mG*mG*mA*rCrUrArGrUrArUrUrCrArArGrArArCrCrCrArCrGrUrU |
| 4 sgRNA | | 6/3-4 | rGrArGrArArUrCrGrArArArGrArUrUrCrUrUrArArUrArArGrGrCr |
| targeting | | ANGPTL3 | ArUrCrCrUrUrCrCrGrArUrGrCrUrGrArCrUrUrCrUrCrArCrCrGrU |
| ANGPTL3 | | D6 | rCrCrGrUrUrUrUrCrCrArArUrArGrGrArGrCrGrGrGrCrGrGrUrAr |
| | | | UrGrU*mU*mU*mU |
| MG3-6/3- | 427 | MG3- | mA*mA*mG*rArArCrUrArCrUrCrCrCrUrUrUrCrUrUrCrArGrGrUrU |
| 4 sgRNA | | 6/3-4 | rGrArGrArArUrCrGrArArArGrArUrUrCrUrUrArArUrArArGrGrCr |
| targeting | | ANGPTL3 | ArUrCrCrUrUrCrCrGrArUrGrCrUrGrArCrUrUrCrUrCrArCrCrGrU |
| ANGPTL3 | | E6 | rCrCrGrUrUrUrUrCrCrArArUrArGrGrArGrCrGrGrGrCrGrGrUrAr |
| | | | UrGrU*mU*mU*mU |
| MG3-6/3- | 428 | MG3- | mA*mC*mU*rArCrUrCrCrCrUrUrUrCrUrUrCrArGrUrUrGrArGrUrU |
| 4 sgRNA | | 6/3-4 | rGrArGrArArUrCrGrArArArGrArUrUrCrUrUrArArUrArArGrGrCr |
| targeting | | ANGPTL3 | ArUrCrCrUrUrCrCrGrArUrGrCrUrGrArCrUrUrCrUrCrArCrCrGrU |
| ANGPTL3 | | F6 | rCrCrGrUrUrUrUrCrCrArArUrArGrGrArGrCrGrGrGrCrGrGrUrAr |
| | | | UrGrU*mU*mU*mU |
| MG3-6/3- | 429 | MG3- | mC*mU*mA*rCrUrCrCrCrUrUrUrCrUrUrCrArGrUrUrGrArArGrUrU |
| 4 sgRNA | | 6/3-4 | rGrArGrArArUrCrGrArArArGrArUrUrCrUrUrArArUrArArGrGrCr |
| targeting | | ANGPTL3 | ArUrCrCrUrUrCrCrGrArUrGrCrUrGrArCrUrUrCrUrCrArCrCrGrU |
| ANGPTL3 | | G6 | rCrCrGrUrUrUrUrCrCrArArUrArGrGrArGrCrGrGrGrCrGrGrUrAr |
| | | | UrGrU*mU*mU*mU |
| MG3-6/3- | 430 | MG3- | mC*mC*mU*rUrUrCrUrUrCrArGrUrUrGrArArUrGrArArArUrGrUrU |
| 4 sgRNA | | 6/3-4 | rGrArGrArArUrCrGrArArArGrArUrUrCrUrUrArArUrArArGrGrCr |
| targeting | | ANGPTL3 | ArUrCrCrUrUrCrCrGrArUrGrCrUrGrArCrUrUrCrUrCrArCrCrGrU |
| ANGPTL3 | | H6 | rCrCrGrUrUrUrUrCrCrArArUrArGrGrArGrCrGrGrGrCrGrGrUrAr |
| | | | UrGrU*mU*mU*mU |
| MG3-6/3- | 431 | MG3- | mG*mG*mU*rGrCrUrCrUrUrGrGrCrUrUrGrGrArArGrArUrArGrUrU |
| 4 sgRNA | | 6/3-4 | rGrArGrArArUrCrGrArArArGrArUrUrCrUrUrArArUrArArGrGrCr |
| targeting | | ANGPTL3 | ArUrCrCrUrUrCrCrGrArUrGrCrUrGrArCrUrUrCrUrCrArCrCrGrU |
| ANGPTL3 | | A7 | rCrCrGrUrUrUrUrCrCrArArUrArGrGrArGrCrGrGrGrCrGrGrUrAr |
| | | | UrGrU*mU*mU*mU |
| MG3-6/3- | 432 | MG3- | mG*mU*mG*rCrUrCrUrUrGrGrCrUrUrGrGrArArGrArUrArGrGrUrU |
| 4 sgRNA | | 6/3-4 | rGrArGrArArUrCrGrArArArGrArUrUrCrUrUrArArUrArArGrGrCr |
| targeting | | ANGPTL3 | ArUrCrCrUrUrCrCrGrArUrGrCrUrGrArCrUrUrCrUrCrArCrCrGrU |
| ANGPTL3 | | B7 | rCrCrGrUrUrUrUrCrCrArArUrArGrGrArGrCrGrGrGrCrGrGrUrAr |
| | | | UrGrU*mU*mU*mU |
| MG3-6/3- | 433 | MG3- | mA*mU*mA*rGrArGrArArArUrUrUrCrUrGrUrGrGrGrUrUrCrGrUrU |
| 4 sgRNA | | 6/3-4 | rGrArGrArArUrCrGrArArArGrArUrUrCrUrUrArArUrArArGrGrCr |
| targeting | | ANGPTL3 | ArUrCrCrUrUrCrCrGrArUrGrCrUrGrArCrUrUrCrUrCrArCrCrGrU |
| ANGPTL3 | | C7 | rCrCrGrUrUrUrUrCrCrArArUrArGrGrArGrCrGrGrGrCrGrGrUrAr |
| | | | UrGrU*mU*mU*mU |
| MG3-6/3- | 434 | MG3- | mG*mA*mA*rUrArCrUrArGrUrCrCrUrUrCrUrGrArGrCrUrGrGrUrU |
| 4 sgRNA | | 6/3-4 | rGrArGrArArUrCrGrArArArGrArUrUrCrUrUrArArUrArArGrGrCr |
| targeting | | ANGPTL3 | ArUrCrCrUrUrCrCrGrArUrGrCrUrGrArCrUrUrCrUrCrArCrCrGrU |
| ANGPTL3 | | D7 | rCrCrGrUrUrUrUrCrCrArArUrArGrGrArGrCrGrGrGrCrGrGrUrAr |
| | | | UrGrU*mU*mU*mU |
| MG3-6/3- | 435 | MG3- | mU*mU*mA*rUrUrGrArUrUrCrUrArGrGrCrArUrUrCrCrUrGrGrUrU |
| 4 sgRNA | | 6/3-4 | rGrArGrArArUrCrGrArArArGrArUrUrCrUrUrArArUrArArGrGrCr |
| targeting | | ANGPTL3 | ArUrCrCrUrUrCrCrGrArUrGrCrUrGrArCrUrUrCrUrCrArCrCrGrU |
| ANGPTL3 | | E7 | rCrCrGrUrUrUrUrCrCrArArUrArGrGrArGrCrGrGrGrCrGrGrUrAr |
| | | | UrGrU*mU*mU*mU |
| MG3-6/3- | 436 | MG3- | mG*mU*mC*rUrArCrUrGrUrGrArUrGrUrUrArUrArUrCrArGrGrUrU |
| 4 sgRNA | | 6/3-4 | rGrArGrArArUrCrGrArArArGrArUrUrCrUrUrArArUrArArGrGrCr |
| targeting | | ANGPTL3 | ArUrCrCrUrUrCrCrGrArUrGrCrUrGrArCrUrUrCrUrCrArCrCrGrU |
| ANGPTL3 | | F7 | rCrCrGrUrUrUrUrCrCrArArUrArGrGrArGrCrGrGrGrCrGrGrUrAr |
| | | | UrGrU*mU*mU*mU |
| MG3-6/3- | 437 | MG3- | mC*mU*mG*rArUrArUrArArCrArUrCrArCrArGrUrArGrArCrGrUrU |
| 4 sgRNA | | 6/3-4 | rGrArGrArArUrCrGrArArArGrArUrUrCrUrUrArArUrArArGrGrCr |
| targeting | | ANGPTL3 | ArUrCrCrUrUrCrCrGrArUrGrCrUrGrArCrUrUrCrUrCrArCrCrGrU |
| ANGPTL3 | | G7 | rCrCrGrUrUrUrUrCrCrArArUrArGrGrArGrCrGrGrGrCrGrGrUrAr |
| | | | UrGrU*mU*mU*mU |
| MG3-6/3- | 438 | MG3- | mU*mG*mA*rUrArUrArArCrArUrCrArCrArGrUrArGrArCrArGrUrU |
| 4 sgRNA | | 6/3-4 | rGrArGrArArUrCrGrArArArGrArUrUrCrUrUrArArUrArArGrGrCr |
| targeting | | ANGPTL3 | ArUrCrCrUrUrCrCrGrArUrGrCrUrGrArCrUrUrCrUrCrArCrCrGrU |
| ANGPTL3 | | H7 | rCrCrGrUrUrUrUrCrCrArArUrArGrGrArGrCrGrGrGrCrGrGrUrAr |
| | | | UrGrU*mU*mU*mU |
| MG3-6/3- | 439 | MG3- | mG*mA*mU*rArUrArArCrArUrCrArCrArGrUrArGrArCrArUrGrUrU |
| 4 sgRNA | | 6/3-4 | rGrArGrArArUrCrGrArArArGrArUrUrCrUrUrArArUrArArGrGrCr |
| targeting | | ANGPTL3 | ArUrCrCrUrUrCrCrGrArUrGrCrUrGrArCrUrUrCrUrCrArCrCrGrU |
| ANGPTL3 | | A8 | rCrCrGrUrUrUrUrCrCrArArUrArGrGrArGrCrGrGrGrCrGrGrUrAr |
| | | | UrGrU*mU*mU*mU |
| MG3-6/3- | 440 | MG3- | mC*mA*mC*rUrUrGrUrArUrGrUrUrCrArCrCrUrCrUrGrUrUrGrUrU |
| 4 sgRNA | | 6/3-4 | rGrArGrArArUrCrGrArArArGrArUrUrCrUrUrArArUrArArGrGrCr |
| targeting | | ANGPTL3 | ArUrCrCrUrUrCrCrGrArUrGrCrUrGrArCrUrUrCrUrCrArCrCrGrU |
| ANGPTL3 | | B8 | rCrCrGrUrUrUrUrCrCrArArUrArGrGrArGrCrGrGrGrCrGrGrUrAr |
| | | | UrGrU*mU*mU*mU |
| MG3-6/3 | 441 | MG3- | mU*mA*mU*rArArArUrGrGrUrGrGrUrArCrArUrUrCrArGrCrGrUrU |
| 4 sgRNA | | 6/3-4 | rGrArGrArArUrCrGrArArArGrArUrUrCrUrUrArArUrArArGrGrCr |
| targeting | | ANGPTL3 | ArUrCrCrUrUrCrCrGrArUrGrCrUrGrArCrUrUrCrUrCrArCrCrGrU |
| ANGPTL3 | | C8 | rCrCrGrUrUrUrUrCrCrArArUrArGrGrArGrCrGrGrGrCrGrGrUrAr |
| | | | UrGrU*mU*mU*mU |
| MG3-6/3- | 442 | MG3- | mU*mG*mG*rUrArCrArUrUrCrArGrCrArGrGrArArUrGrCrCrGrUrU |
| 4 sgRNA | | 6/3-4 | rGrArGrArArUrCrGrArArArGrArUrUrCrUrUrArArUrArArGrGrCr |
| targeting | | ANGPTL3 | ArUrCrCrUrUrCrCrGrArUrGrCrUrGrArCrUrUrCrUrCrArCrCrGrU |
| ANGPTL3 | | D8 | rCrCrGrUrUrUrUrCrCrArArUrArGrGrArGrCrGrGrGrCrGrGrUrAr |
| | | | UrGrU*mU*mU*mU |
| MG3-6/3- | 443 | MG3- | mG*mU*mC*rCrArUrGrGrArCrArUrUrArArUrUrCrArArCrArGrUrU |
| 4 sgRNA | | 6/3-4 | rGrArGrArArUrCrGrArArArGrArUrUrCrUrUrArArUrArArGrGrCr |
| targeting | | ANGPTL3 | ArUrCrCrUrUrCrCrGrArUrGrCrUrGrArCrUrUrCrUrCrArCrCrGrU |
| ANGPTL3 | | E8 | rCrCrGrUrUrUrUrCrCrArArUrArGrGrArGrCrGrGrGrCrGrGrUrAr |
| | | | UrGrU*mU*mU*mU |
| MG3-6/3- | 444 | MG3- | mU*mU*mC*rArArCrArUrCrGrArArUrArGrArUrGrGrArUrCrGrUrU |
| 4 sgRNA | | 6/3-4 | rGrArGrArArUrCrGrArArArGrArUrUrCrUrUrArArUrArArGrGrCr |
| targeting | | ANGPTL3 | ArUrCrCrUrUrCrCrGrArUrGrCrUrGrArCrUrUrCrUrCrArCrCrGrU |
| ANGPTL3 | | F8 | rCrCrGrUrUrUrUrCrCrArArUrArGrGrArGrCrGrGrGrCrGrGrUrAr |
| | | | UrGrU*mU*mU*mU |
| MG3-6/3- | 445 | MG3- | mA*mU*mA*rGrArUrGrGrArUrCrArCrArArArArCrUrUrCrArGrUrU |
| 4 sgRNA | | 6/3-4 | rGrArGrArArUrCrGrArArArGrArUrUrCrUrUrArArUrArArGrGrCr |
| targeting | | ANGPTL3 | ArUrCrCrUrUrCrCrGrArUrGrCrUrGrArCrUrUrCrUrCrArCrCrGrU |
| ANGPTL3 | | G8 | rCrCrGrUrUrUrUrCrCrArArUrArGrGrArGrCrGrGrGrCrGrGrUrAr |
| | | | UrGrU*mU*mU*mU |
| MG3-6/3- | 446 | MG3- | mU*mU*mC*rArArUrGrArArArCrGrUrGrGrGrArGrArArCrUrGrUrU |
| 4 sgRNA | | 6/3-4 | rGrArGrArArUrCrGrArArArGrArUrUrCrUrUrArArUrArArGrGrCr |
| targeting | | ANGPTL3 | ArUrCrCrUrUrCrCrGrArUrGrCrUrGrArCrUrUrCrUrCrArCrCrGrU |
| ANGPTL3 | | H8 | rCrCrGrUrUrUrUrCrCrArArUrArGrGrArGrCrGrGrGrCrGrGrUrAr |
| | | | UrGrU*mU*mU*mU |
| MG3-6/3- | 447 | MG3- | mA*mG*mU*rCrCrCrCrUrUrArCrCrArUrCrArArGrCrCrUrCrGrUrU |
| 4 sgRNA | | 6/3-4 | rGrArGrArArUrCrGrArArArGrArUrUrCrUrUrArArUrArArGrGrCr |
| targeting | | ANGPTL3 | ArUrCrCrUrUrCrCrGrArUrGrCrUrGrArCrUrUrCrUrCrArCrCrGrU |
| ANGPTL3 | | A9 | rCrCrGrUrUrUrUrCrCrArArUrArGrGrArGrCrGrGrGrCrGrGrUrAr |
| | | | UrGrU*mU*mU*mU |
| MG3-6/3- | 448 | MG3- | mU*mU*mU*rGrUrGrArUrCrCrArUrCrUrArUrUrCrGrArUrGrGrUrU |
| 4 sgRNA | | 6/3-4 | rGrArGrArArUrCrGrArArArGrArUrUrCrUrUrArArUrArArGrGrCr |
| targeting | | ANGPTL3 | ArUrCrCrUrUrCrCrGrArUrGrCrUrGrArCrUrUrCrUrCrArCrCrGrU |
| ANGPTL3 | | B9 | rCrCrGrUrUrUrUrCrCrArArUrArGrGrArGrCrGrGrGrCrGrGrUrAr |
| | | | UrGrU*mU*mU*mU |
| MG3-6/3- | 449 | MG3- | mU*mG*mA*rArUrUrArArUrGrUrCrCrArUrGrGrArCrUrArCrGrUrU |
| 4 sgRNA | | 6/3-4 | rGrArGrArArUrCrGrArArArGrArUrUrCrUrUrArArUrArArGrGrCr |
| targeting | | ANGPTL3 | ArUrCrCrUrUrCrCrGrArUrGrCrUrGrArCrUrUrCrUrCrArCrCrGrU |
| ANGPTL3 | | C9 | rCrCrGrUrUrUrUrCrCrArArUrArGrGrArGrCrGrGrGrCrGrGrUrAr |
| | | | UrGrU*mU*mU*mU |
| MG3-6/3- | 450 | MG3- | mU*mU*mU*rArCrGrArArUrUrGrArGrUrUrGrGrArArGrArCrGrUrU |
| 4 sgRNA | | 6/3-4 | rGrArGrArArUrCrGrArArArGrArUrUrCrUrUrArArUrArArGrGrCr |
| targeting | | ANGPTL3 | ArUrCrCrUrUrCrCrGrArUrGrCrUrGrArCrUrUrCrUrCrArCrCrGrU |
| ANGPTL3 | | D9 | rCrCrGrUrUrUrUrCrCrArArUrArGrGrArGrCrGrGrGrCrGrGrUrAr |
| | | | UrGrU*mU*mU*mU |
| MG3-6/3- | 451 | MG3- | mG*mG*mC*rArArUrGrUrCrCrCrCrArArUrGrCrArArUrCrCrGrUrU |
| 4 sgRNA | | 6/3-4 | rGrArGrArArUrCrGrArArArGrArUrUrCrUrUrArArUrArArGrGrCr |
| targeting | | ANGPTL3 | ArUrCrCrUrUrCrCrGrArUrGrCrUrGrArCrUrUrCrUrCrArCrCrGrU |
| ANGPTL3 | | E9 | rCrCrGrUrUrUrUrCrCrArArUrArGrGrArGrCrGrGrGrCrGrGrUrAr |
| | | | UrGrU*mU*mU*mU |
| MG3-6/3- | 452 | MG3- | mG*mC*mA*rArUrGrUrCrCrCrCrArArUrGrCrArArUrCrCrCrGrUrU |
| 4 sgRNA | | 6/3-4 | rGrArGrArArUrCrGrArArArGrArUrUrCrUrUrArArUrArArGrGrCr |
| targeting | | ANGPTL3 | ArUrCrCrUrUrCrCrGrArUrGrCrUrGrArCrUrUrCrUrCrArCrCrGrU |
| ANGPTL3 | | F9 | rCrCrGrUrUrUrUrCrCrArArUrArGrGrArGrCrGrGrGrCrGrGrUrAr |
| | | | UrGrU*mU*mU*mU |
| MG3-6/3- | 453 | MG3- | mG*mU*mU*rUrUrCrUrArCrUrUrGrGrGrArUrCrArCrArArArGrUrU |
| 4 sgRNA | | 6/3-4 | rGrArGrArArUrCrGrArArArGrArUrUrCrUrUrArArUrArArGrGrCr |
| targeting | | ANGPTL3 | ArUrCrCrUrUrCrCrGrArUrGrCrUrGrArCrUrUrCrUrCrArCrCrGrU |
| ANGPTL3 | | G9 | rCrCrGrUrUrUrUrCrCrArArUrArGrGrArGrCrGrGrGrCrGrGrUrAr |
| | | | UrGrU*mU*mU*mU |
| MG3-6/3- | 454 | MG3- | mC*mC*mU*rUrUrUrGrCrUrUrUrGrUrGrArUrCrCrCrArArGrGrUrU |
| 4 sgRNA | | 6/3-4 | rGrArGrArArUrCrGrArArArGrArUrUrCrUrUrArArUrArArGrGrCr |
| targeting | | ANGPTL3 | ArUrCrCrUrUrCrCrGrArUrGrCrUrGrArCrUrUrCrUrCrArCrCrGrU |
| ANGPTL3 | | H9 | rCrCrGrUrUrUrUrCrCrArArUrArGrGrArGrCrGrGrGrCrGrGrUrAr |
| | | | UrGrU*mU*mU*mU |
| MG3-6/3- | 455 | MG3- | mC*mU*mU*rUrUrGrCrUrUrUrGrUrGrArUrCrCrCrArArGrUrGrUrU |
| 4 sgRNA | | 6/3-4 | rGrArGrArArUrCrGrArArArGrArUrUrCrUrUrArArUrArArGrGrCr |
| targeting | | ANGPTL3 | ArUrCrCrUrUrCrCrGrArUrGrCrUrGrArCrUrUrCrUrCrArCrCrGrU |
| ANGPTL3 | | A10 | rCrCrGrUrUrUrUrCrCrArArUrArGrGrArGrCrGrGrGrCrGrGrUrAr |
| | | | UrGrU*mU*mU*mU |
| MG3-6/3- | 456 | MG3- | mU*mU*mG*rUrGrArUrCrCrCrArArGrUrArGrArArArArCrArGrUrU |
| 4 sgRNA | | 6/3-4 | rGrArGrArArUrCrGrArArArGrArUrUrCrUrUrArArUrArArGrGrCr |
| targeting | | ANGPTL3 | ArUrCrCrUrUrCrCrGrArUrGrCrUrGrArCrUrUrCrUrCrArCrCrGrU |
| ANGPTL3 | | B10 | rCrCrGrUrUrUrUrCrCrArArUrArGrGrArGrCrGrGrGrCrGrGrUrAr |
| | | | UrGrU*mU*mU*mU |
| MG3-6/3- | 457 | MG3- | mA*mG*mU*rUrGrGrUrUrUrCrGrUrGrArUrUrUrCrCrCrArArGrUrU |
| 4 sgRNA | | 6/3-4 | rGrArGrArArUrCrGrArArArGrArUrUrCrUrUrArArUrArArGrGrCr |
| targeting | | ANGPTL3 | ArUrCrCrUrUrCrCrGrArUrGrCrUrGrArCrUrUrCrUrCrArCrCrGrU |
| ANGPTL3 | | C10 | rCrCrGrUrUrUrUrCrCrArArUrArGrGrArGrCrGrGrGrCrGrGrUrAr |
| | | | UrGrU*mU*mU*mU |
| MG3-6/3- | 458 | MG3- | mG*mU*mU*rGrGrUrUrUrCrGrUrGrArUrUrUrCrCrCrArArGrGrUrU |
| 4 sgRNA | | 6/3-4 | rGrArGrArArUrCrGrArArArGrArUrUrCrUrUrArArUrArArGrGrCr |
| targeting | | ANGPTL3 | ArUrCrCrUrUrCrCrGrArUrGrCrUrGrArCrUrUrCrUrCrArCrCrGrU |
| ANGPTL3 | | D10 | rCrCrGrUrUrUrUrCrCrArArUrArGrGrArGrCrGrGrGrCrGrGrUrAr |
| | | | UrGrU*mU*mU*mU |
| MG3-6/3 | 459 | MG3- | mG*mU*mU*rUrCrGrUrGrArUrUrUrCrCrCrArArGrUrArArArGrUrU |
| 4 sgRNA | | 6/3-4 | rGrArGrArArUrCrGrArArArGrArUrUrCrUrUrArArUrArArGrGrCr |
| targeting | | ANGPTL3 | ArUrCrCrUrUrCrCrGrArUrGrCrUrGrArCrUrUrCrUrCrArCrCrGrU |
| ANGPTL3 | | E10 | rCrCrGrUrUrUrUrCrCrArArUrArGrGrArGrCrGrGrGrCrGrGrUrAr |
| | | | UrGrU*mU*mU*mU |
| MG3-6/3- | 460 | MG3- | mU*mU*mC*rCrArGrUrCrUrUrCrCrArArCrUrCrArArUrUrCrGrUrU |
| 4 sgRNA | | 6/3-4 | rGrArGrArArUrCrGrArArArGrArUrUrCrUrUrArArUrArArGrGrCr |
| targeting | | ANGPTL3 | ArUrCrCrUrUrCrCrGrArUrGrCrUrGrArCrUrUrCrUrCrArCrCrGrU |
| ANGPTL3 | | F10 | rCrCrGrUrUrUrUrCrCrArArUrArGrGrArGrCrGrGrGrCrGrGrUrAr |
| | | | UrGrU*mU*mU*mU |
| MG3-6/3- | 461 | MG3- | mA*mG*mU*rArUrArUrCrUrUrCrUrCrUrArGrGrCrCrCrArArGrUrU |
| 4 sgRNA | | 6/3-4 | rGrArGrArArUrCrGrArArArGrArUrUrCrUrUrArArUrArArGrGrCr |
| targeting | | ANGPTL3 | ArUrCrCrUrUrCrCrGrArUrGrCrUrGrArCrUrUrCrUrCrArCrCrGrU |
| ANGPTL3 | | G10 | rCrCrGrUrUrUrUrCrCrArArUrArGrGrArGrCrGrGrGrCrGrGrUrAr |
| | | | UrGrU*mU*mU*mU |
| MG3-6/3- | 462 | MG3- | mG*mU*mA*rUrArUrCrUrUrCrUrCrUrArGrGrCrCrCrArArCrGrUrU |
| 4 sgRNA | | 6/3-4 | rGrArGrArArUrCrGrArArArGrArUrUrCrUrUrArArUrArArGrGrCr |
| targeting | | ANGPTL3 | ArUrCrCrUrUrCrCrGrArUrGrCrUrGrArCrUrUrCrUrCrArCrCrGrU |
| ANGPTL3 | | H10 | rCrCrGrUrUrUrUrCrCrArArUrArGrGrArGrCrGrGrGrCrGrGrUrAr |
| | | | UrGrU*mU*mU*mU |
| MG3-6/3- | 463 | MG3- | mU*mC*mU*rArGrGrCrCrCrArArCrCrArArArArUrUrCrUrCrGrUrU |
| 4 sgRNA | | 6/3-4 | rGrArGrArArUrCrGrArArArGrArUrUrCrUrUrArArUrArArGrGrCr |
| targeting | | ANGPTL3 | ArUrCrCrUrUrCrCrGrArUrGrCrUrGrArCrUrUrCrUrCrArCrCrGrU |
| ANGPTL3 | | A11 | rCrCrGrUrUrUrUrCrCrArArUrArGrGrArGrCrGrGrGrCrGrGrUrAr |
| | | | UrGrU*mU*mU*mU |
| MG3-6/3- | 464 | MG3- | mC*mU*mA*rGrGrCrCrCrArArCrCrArArArArUrUrCrUrCrCrGrUrU |
| 4 sgRNA | | 6/3-4 | rGrArGrArArUrCrGrArArArGrArUrUrCrUrUrArArUrArArGrGrCr |
| targeting | | ANGPTL3 | ArUrCrCrUrUrCrCrGrArUrGrCrUrGrArCrUrUrCrUrCrArCrCrGrU |
| ANGPTL3 | | B11 | rCrCrGrUrUrUrUrCrCrArArUrArGrGrArGrCrGrGrGrCrGrGrUrAr |
| | | | UrGrU*mU*mU*mU |
| MG3-6/3- | 465 | MG3- | mG*mC*mC*rCrArArCrCrArArArArUrUrCrUrCrCrUrGrArArGrUrU |
| 4 sgRNA | | 6/3-4 | rGrArGrArArUrCrGrArArArGrArUrUrCrUrUrArArUrArArGrGrCr |
| targeting | | ANGPTL3 | ArUrCrCrUrUrCrCrGrArUrGrCrUrGrArCrUrUrCrUrCrArCrCrGrU |
| ANGPTL3 | | C11 | rCrCrGrUrUrUrUrCrCrArArUrArGrGrArGrCrGrGrGrCrGrGrUrAr |
| | | | UrGrU*mU*mU*mU |
| MG3-6/3- | 466 | MG3- | mU*mG*mG*rUrGrGrUrGrGrCrArUrGrArUrGrArGrUrGrUrGrGrUrU |
| 4 sgRNA | | 6/3-4 | rGrArGrArArUrCrGrArArArGrArUrUrCrUrUrArArUrArArGrGrCr |
| targeting | | ANGPTL3 | ArUrCrCrUrUrCrCrGrArUrGrCrUrGrArCrUrUrCrUrCrArCrCrGrU |
| ANGPTL3 | | D11 | rCrCrGrUrUrUrUrCrCrArArUrArGrGrArGrCrGrGrGrCrGrGrUrAr |
| | | | UrGrU*mU*mU*mU |
| MG3-6/3- | 467 | MG3- | mG*mG*mU*rGrGrUrGrGrCrArUrGrArUrGrArGrUrGrUrGrGrGrUrU |
| 4 sgRNA | | 6/3-4 | rGrArGrArArUrCrGrArArArGrArUrUrCrUrUrArArUrArArGrGrCr |
| targeting | | ANGPTL3 | ArUrCrCrUrUrCrCrGrArUrGrCrUrGrArCrUrUrCrUrCrArCrCrGrU |
| ANGPTL3 | | E11 | rCrCrGrUrUrUrUrCrCrArArUrArGrGrArGrCrGrGrGrCrGrGrUrAr |
| | | | UrGrU*mU*mU*mU |
| MG3-6/3- | 468 | MG3- | mU*mG*mA*rUrGrArGrUrGrUrGrGrArGrArArArArCrArArCrGrUrU |
| 4 sgRNA | | 6/3-4 | rGrArGrArArUrCrGrArArArGrArUrUrCrUrUrArArUrArArGrGrCr |
| targeting | | ANGPTL3 | ArUrCrCrUrUrCrCrGrArUrGrCrUrGrArCrUrUrCrUrCrArCrCrGrU |
| ANGPTL3 | | F11 | rCrCrGrUrUrUrUrCrCrArArUrArGrGrArGrCrGrGrGrCrGrGrUrAr |
| | | | UrGrU*mU*mU*mU |
| MG3-6/3- | 469 | MG3- | mU*mG*mU*rGrGrArGrArArArArCrArArCrCrUrArArArUrGrGrUrU |
| 4 sgRNA | | 6/3-4 | rGrArGrArArUrCrGrArArArGrArUrUrCrUrUrArArUrArArGrGrCr |
| targeting | | ANGPTL3 | ArUrCrCrUrUrCrCrGrArUrGrCrUrGrArCrUrUrCrUrCrArCrCrGrU |
| ANGPTL3 | | G11 | rCrCrGrUrUrUrUrCrCrArArUrArGrGrArGrCrGrGrGrCrGrGrUrAr |
| | | | UrGrU*mU*mU*mU |
| MG3-6/3- | 470 | MG3- | mG*mG*mU*rArArArUrArUrArArCrArArArCrCrArArGrArGrGrUrU |
| 4 sgRNA | | 6/3-4 | rGrArGrArArUrCrGrArArArGrArUrUrCrUrUrArArUrArArGrGrCr |
| targeting | | ANGPTL3 | ArUrCrCrUrUrCrCrGrArUrGrCrUrGrArCrUrUrCrUrCrArCrCrGrU |
| ANGPTL3 | | H11 | rCrCrGrUrUrUrUrCrCrArArUrArGrGrArGrCrGrGrGrCrGrGrUrAr |
| | | | UrGrU*mU*mU*mU |
| MG3-6/3- | 471 | MG3- | mG*mA*mA*rGrArGrGrArUrUrArUrCrUrUrGrGrArArGrUrCrGrUrU |
| 4 sgRNA | | 6/3-4 | rGrArGrArArUrCrGrArArArGrArUrUrCrUrUrArArUrArArGrGrCr |
| targeting | | ANGPTL3 | ArUrCrCrUrUrCrCrGrArUrGrCrUrGrArCrUrUrCrUrCrArCrCrGrU |
| ANGPTL3 | | A12 | rCrCrGrUrUrUrUrCrCrArArUrArGrGrArGrCrGrGrGrCrGrGrUrAr |
| | | | UrGrU*mU*mU*mU |
| MG3-6/3- | 472 | MG3- | mA*mA*mG*rArGrGrArUrUrArUrCrUrUrGrGrArArGrUrCrUrGrUrU |
| 4 sgRNA | | 6/3-4 | rGrArGrArArUrCrGrArArArGrArUrUrCrUrUrArArUrArArGrGrCr |
| targeting | | ANGPTL3 | ArUrCrCrUrUrCrCrGrArUrGrCrUrGrArCrUrUrCrUrCrArCrCrGrU |
| ANGPTL3 | | B12 | rCrCrGrUrUrUrUrCrCrArArUrArGrGrArGrCrGrGrGrCrGrGrUrAr |
| | | | UrGrU*mU*mU*mU |
| MG3-6/3- | 473 | MG3- | mU*mC*mA*rArArArUrGrGrArArGrGrUrUrArUrArCrUrCrUrGrUrU |
| 4 sgRNA | | 6/3-4 | rGrArGrArArUrCrGrArArArGrArUrUrCrUrUrArArUrArArGrGrCr |
| targeting | | ANGPTL3 | ArUrCrCrUrUrCrCrGrArUrGrCrUrGrArCrUrUrCrUrCrArCrCrGrU |
| ANGPTL3 | | C12 | rCrCrGrUrUrUrUrCrCrArArUrArGrGrArGrCrGrGrGrCrGrGrUrAr |
| | | | UrGrU*mU*mU*mU |
| MG3-6/3- | 474 | MG3- | mC*mA*mA*rArArUrGrGrArArGrGrUrUrArUrArCrUrCrUrArGrUrU |
| 4 sgRNA | | 6/3-4 | rGrArGrArArUrCrGrArArArGrArUrUrCrUrUrArArUrArArGrGrCr |
| targeting | | ANGPTL3 | ArUrCrCrUrUrCrCrGrArUrGrCrUrGrArCrUrUrCrUrCrArCrCrGrU |
| ANGPTL3 | | D12 | rCrCrGrUrUrUrUrCrCrArArUrArGrGrArGrCrGrGrGrCrGrGrUrAr |
| | | | UrGrU*mU*mU*mU |
| MG3-6/3- | 475 | MG3- | mA*mU*mG*rUrUrGrArUrCrCrArUrCrCrArArCrArGrArUrUrGrUrU |
| 4 sgRNA | | 6/3-4 | rGrArGrArArUrCrGrArArArGrArUrUrCrUrUrArArUrArArGrGrCr |
| targeting | | ANGPTL3 | ArUrCrCrUrUrCrCrGrArUrGrCrUrGrArCrUrUrCrUrCrArCrCrGrU |
| ANGPTL3 | | E12 | rCrCrGrUrUrUrUrCrCrArArUrArGrGrArGrCrGrGrGrCrGrGrUrAr |
| | | | UrGrU*mU*mU*mU |
| MG3-6/3- | 476 | MG3- | mC*mA*mU*rCrCrArArCrArGrArUrUrCrArGrArArArGrCrUrGrUrU |
| 4 sgRNA | | 6/3-4 | rGrArGrArArUrCrGrArArArGrArUrUrCrUrUrArArUrArArGrGrCr |
| targeting | | ANGPTL3 | ArUrCrCrUrUrCrCrGrArUrGrCrUrGrArCrUrUrCrUrCrArCrCrGrU |
| ANGPTL3 | | F12 | rCrCrGrUrUrUrUrCrCrArArUrArGrGrArGrCrGrGrGrCrGrGrUrAr |
| | | | UrGrU*mU*mU*mU |
| MG3-6/3- | 477 | MG3- | mG*mC*mC*rUrCrArGrUrUrCrArUrUrCrArArArGrCrUrUrUrGrUrU |
| 4 sgRNA | | 6/3-4 | rGrArGrArArUrCrGrArArArGrArUrUrCrUrUrArArUrArArGrGrCr |
| targeting | | ANGPTL3 | ArUrCrCrUrUrCrCrGrArUrGrCrUrGrArCrUrUrCrUrCrArCrCrGrU |
| ANGPTL3 | | G12 | rCrCrGrUrUrUrUrCrCrArArUrArGrGrArGrCrGrGrGrCrGrGrUrAr |
| | | | UrGrU*mU*mU*mU |
| DNA | 478 | MG3- | TTGTTCCTCTAGTTATTTCCTC |
| sequence | | 6/3-4 | |
| of | | ANGPTL3 | |
| ANGPTL3 | | A1 | |
| target | | | |
| site | | | |
| DNA | 479 | MG3- | ATTTGATTCTCTATCTCCAGAG |
| sequence | | 6/3-4 | |
| of | | ANGPTL3 | |
| ANGPTL3 | | B1 | |
| target | | | |
| site | | | |
| DNA | 480 | MG3- | TTTGATTCTCTATCTCCAGAGC |
| sequence | | 6/3-4 | |
| of | | ANGPTL3 | |
| ANGPTL3 | | C1 | |
| target | | | |
| site | | | |
| DNA | 481 | MG3- | AAGATTTGCTATGTTAGACGAT |
| sequence | | 6/3-4 | |
| of | | ANGPTL3 | |
| ANGPTL3 | | D1 | |
| target | | | |
| site | | | |
| DNA | 482 | MG3- | AGATTTGCTATGTTAGACGATG |
| sequence | | 6/3-4 | |
| of | | ANGPTL3 | |
| ANGPTL3 | | E1 | |
| target | | | |
| site | | | |
| DNA | 483 | MG3- | GATTTGCTATGTTAGACGATGT |
| sequence | | 6/3-4 | |
| of | | ANGPTL3 | |
| ANGPTL3 | | F1 | |
| target | | | |
| site | | | |
| DNA | 484 | MG3- | ACTTTGTCCATAAGACGAAGGG |
| sequence | | 6/3-4 | |
| of | | ANGPTL3 | |
| ANGPTL3 | | G1 | |
| target | | | |
| site | | | |
| DNA | 485 | MG3- | AGGGCCAAATTAATGACATATT |
| sequence | | 6/3-4 | |
| of | | ANGPTL3 | |
| ANGPTL3 | | H1 | |
| target | | | |
| site | | | |
| DNA | 486 | MG3- | GGGCCAAATTAATGACATATTT |
| sequence | | 6/3-4 | |
| of | | ANGPTL3 | |
| ANGPTL3 | | A2 | |
| target | | | |
| site | | | |
| DNA | 487 | MG3- | TATGATCTATCGCTGCAAACCA |
| sequence | | 6/3-4 | |
| of | | ANGPTL3 | |
| ANGPTL3 | | B2 | |
| target | | | |
| site | | | |
| DNA | 488 | MG3- | ATGATCTATCGCTGCAAACCAG |
| sequence | | 6/3-4 | |
| of | | ANGPTL3 | |
| ANGPTL3 | | C2 | |
| target | | | |
| site | | | |
| DNA | 489 | MG3- | CAAACCAGTGAAATCAAAGAAG |
| sequence | | 6/3-4 | |
| of | | ANGPTL3 | |
| ANGPTL3 | | D2 | |
| target | | | |
| site | | | |
| DNA | 490 | MG3- | AAACCAGTGAAATCAAAGAAGA |
| sequence | | 6/3-4 | |
| of | | ANGPTL3 | |
| ANGPTL3 | | E2 | |
| target | | | |
| site | | | |
| DNA | 491 | MG3- | ACAAGTCAAAAATGAAGAGGTA |
| sequence | | 6/3-4 | |
| of | | ANGPTL3 | |
| ANGPTL3 | | F2 | |
| target | | | |
| site | | | |
| DNA | 492 | MG3- | GAATATGTCACTTGAACTCAAC |
| sequence | | 6/3-4 | |
| of | | ANGPTL3 | |
| ANGPTL3 | | G2 | |
| target | | | |
| site | | | |
| DNA | 493 | MG3- | TCACTTGAACTCAACTCAAAAC |
| sequence | | 6/3-4 | |
| of | | ANGPTL3 | |
| ANGPTL3 | | H2 | |
| target | | | |
| site | | | |
| DNA | 494 | MG3- | TCAAAACTTGAAAGCCTCCTAG |
| sequence | | 6/3-4 | |
| of | | ANGPTL3 | |
| ANGPTL3 | | A3 | |
| target | | | |
| site | | | |
| DNA | 495 | MG3- | CAAAACTTGAAAGCCTCCTAGA |
| sequence | | 6/3-4 | |
| of | | ANGPTL3 | |
| ANGPTL3 | | B3 | |
| target | | | |
| site | | | |
| DNA | 496 | MG3- | AAAACTTGAAAGCCTCCTAGAA |
| sequence | | 6/3-4 | |
| of | | ANGPTL3 | |
| ANGPTL3 | | C3 | |
| target | | | |
| site | | | |
| DNA | 497 | MG3- | AAACTTGAAAGCCTCCTAGAAG |
| sequence | | 6/3-4 | |
| of | | ANGPTL3 | |
| ANGPTL3 | | D3 | |
| target | | | |
| site | | | |
| DNA | 498 | MG3- | AACTTGAAAGCCTCCTAGAAGA |
| sequence | | 6/3-4 | |
| of | | ANGPTL3 | |
| ANGPTL3 | | E3 | |
| target | | | |
| site | | | |
| DNA | 499 | MG3- | GTTCTGGAGTTTCAGGTTGATT |
| sequence | | 6/3-4 | |
| of | | ANGPTL3 | |
| ANGPTL3 | | F3 | |
| target | | | |
| site | | | |
| DNA | 500 | MG3- | CACTGGTTTGCAGCGATAGATC |
| sequence | | 6/3-4 | |
| of | | ANGPTL3 | |
| ANGPTL3 | | G3 | |
| target | | | |
| site | | | |
| DNA | 501 | MG3- | ACTGGTTTGCAGCGATAGATCA |
| sequence | | 6/3-4 | |
| of | | ANGPTL3 | |
| ANGPTL3 | | H3 | |
| target | | | |
| site | | | |
| DNA | 502 | MG3- | CGATAGATCATAAAAAGACTGA |
| sequence | | 6/3-4 | |
| of | | ANGPTL3 | |
| ANGPTL3 | | A4 | |
| target | | | |
| site | | | |
| DNA | 503 | MG3- | CCCAACTGAAGGAGGCCATTGG |
| sequence | | 6/3-4 | |
| of | | ANGPTL3 | |
| ANGPTL3 | | B4 | |
| target | | | |
| site | | | |
| DNA | 504 | MG3- | CCAACTGAAGGAGGCCATTGGC |
| sequence | | 6/3-4 | |
| of | | ANGPTL3 | |
| ANGPTL3 | | C4 | |
| target | | | |
| site | | | |
| DNA | 505 | MG3- | CTTGATTTTGGCTCTGGAGATA |
| sequence | | 6/3-4 | |
| of | | ANGPTL3 | |
| ANGPTL3 | | D4 | |
| target | | | |
| site | | | |
| DNA | 506 | MG3- | TTTTGGCTCTGGAGATAGAGAA |
| sequence | | 6/3-4 | |
| of | | ANGPTL3 | |
| ANGPTL3 | | E4 | |
| target | | | |
| site | | | |
| DNA | 507 | MG3- | TCTGGAGATAGAGAATCAAATG |
| sequence | | 6/3-4 | |
| of | | ANGPTL3 | |
| ANGPTL3 | | F4 | |
| target | | | |
| site | | | |
| DNA | 508 | MG3- | GAATTGTCTTGATCAATTCTGG |
| sequence | | 6/3-4 | |
| of | | ANGPTL | |
| ANGPTL3 | | G4 | |
| target | | | |
| site | | | |
| DNA | 509 | MG3- | AATTGTCTTGATCAATTCTGGA |
| sequence | | 6/3-4 | |
| of | | ANGPTL3 | |
| ANGPTL3 | | H4 | |
| target | | | |
| site | | | |
| DNA | 510 | MG3- | GGAGGAAATAACTAGAGGAACA |
| sequence | | 6/3-4 | |
| of | | ANGPTL3 | |
| ANGPTL3 | | A5 | |
| target | | | |
| site | | | |
| DNA | 511 | MG3- | GAGGAAATAACTAGAGGAACAA |
| sequence | | 6/3-4 | |
| of | | ANGPTL3 | |
| ANGPTL3 | | B5 | |
| target | | | |
| site | | | |
| DNA | 512 | MG3- | ACTCTCTATATCCAGACTTTTG |
| sequence | | 6/3-4 | |
| of | | ANGPTL3 | |
| ANGPTL3 | | C5 | |
| target | | | |
| site | | | |
| DNA | 513 | MG3- | CTCTCTATATCCAGACTTTTGT |
| sequence | | 6/3-4 | |
| of | | ANGPTL3 | |
| ANGPTL3 | | D5 | |
| target | | | |
| site | | | |
| DNA | 514 | MG3- | TCTCTATATCCAGACTTTTGTA |
| sequence | | 6/3-4 | |
| of | | ANGPTL3 | |
| ANGPTL3 | | E5 | |
| target | | | |
| site | | | |
| DNA | 515 | MG3- | AACAATTAAACCAACAGCATAG |
| sequence | | 6/3-4 | |
| of | | ANGPTL3 | |
| ANGPTL3 | | F5 | |
| target | | | |
| site | | | |
| DNA | 516 | MG3- | ATTAAACCAACAGCATAGTCAA |
| sequence | | 6/3-4 | |
| of | | ANGPTL3 | |
| ANGPTL3 | | G5 | |
| target | | | |
| site | | | |
| DNA | 517 | MG3- | AACCAACAGCATAGTCAAATAA |
| sequence | | 6/3-4 | |
| of | | ANGPTL3 | |
| ANGPTL3 | | H5 | |
| target | | | |
| site | | | |
| DNA | 518 | MG3- | ACCAACAGCATAGTCAAATAAA |
| sequence | | 6/3-4 | |
| of | | ANGPTL3 | |
| ANGPTL3 | | A6 | |
| target | | | |
| site | | | |
| DNA | 519 | MG3- | GATGCTATTATCTTGTTTTTCT |
| sequence | | 6/3-4 | |
| of | | ANGPTL3 | |
| ANGPTL3 | | B6 | |
| target | | | |
| site | | | |
| DNA | 520 | MG3- | AGGACTAGTATTCAAGAACCCA |
| sequence | | 6/3-4 | |
| of | | ANGPTL3 | |
| ANGPTL3 | | C6 | |
| target | | | |
| site | | | |
| DNA | 521 | MG3- | GGACTAGTATTCAAGAACCCAC |
| sequence | | 6/3-4 | |
| of | | ANGPTL3 | |
| ANGPTL3 | | D6 | |
| target | | | |
| site | | | |
| DNA | 522 | MG3- | AAGAACTACTCCCTTTCTTCAG |
| sequence | | 6/3-4 | |
| of | | ANGPTL3 | |
| ANGPTL3 | | E6 | |
| target | | | |
| site | | | |
| DNA | 523 | MG3- | ACTACTCCCTTTCTTCAGTTGA |
| sequence | | 6/3-4 | |
| of | | ANGPTL3 | |
| ANGPTL3 | | F6 | |
| target | | | |
| site | | | |
| DNA | 524 | MG3- | CTACTCCCTTTCTTCAGTTGAA |
| sequence | | 6/3-4 | |
| of | | ANGPTL3 | |
| ANGPTL3 | | G6 | |
| target | | | |
| site | | | |
| DNA | 525 | MG3- | CCTTTCTTCAGTTGAATGAAAT |
| sequence | | 6/3-4 | |
| of | | ANGPTL3 | |
| ANGPTL3 | | H6 | |
| target | | | |
| site | | | |
| DNA | 526 | MG3- | GGTGCTCTTGGCTTGGAAGATA |
| sequence | | 6/3-4 | |
| of | | ANGPTL3 | |
| ANGPTL3 | | A7 | |
| target | | | |
| site | | | |
| DNA | 527 | MG3- | GTGCTCTTGGCTTGGAAGATAG |
| sequence | | 6/3-4 | |
| of | | ANGPTL3 | |
| ANGPTL3 | | B7 | |
| target | | | |
| site | | | |
| DNA | 528 | MG3- | ATAGAGAAATTTCTGTGGGTTC |
| sequence | | 6/3-4 | |
| of | | ANGPTL3 | |
| ANGPTL3 | | C7 | |
| target | | | |
| site | | | |
| DNA | 529 | MG3- | GAATACTAGTCCTTCTGAGCTG |
| sequence | | 6/3-4 | |
| of | | ANGPTL3 | |
| ANGPTL3 | | D7 | |
| target | | | |
| site | | | |
| DNA | 530 | MG3- | TTATTGATTCTAGGCATTCCTG |
| sequence | | 6/3-4 | |
| of | | ANGPTL3 | |
| ANGPTL3 | | E7 | |
| target | | | |
| site | | | |
| DNA | 531 | MG3- | GTCTACTGTGATGTTATATCAG |
| sequence | | 6/3-4 | |
| of | | ANGPTL3 | |
| ANGPTL3 | | F7 | |
| target | | | |
| site | | | |
| DNA | 532 | MG3- | CTGATATAACATCACAGTAGAC |
| sequence | | 6/3-4 | |
| of | | ANGPTL3 | |
| ANGPTL3 | | G7 | |
| target | | | |
| site | | | |
| DNA | 533 | MG3- | TGATATAACATCACAGTAGACA |
| sequence | | 6/3-4 | |
| of | | ANGPTL3 | |
| ANGPTL3 | | H7 | |
| target | | | |
| site | | | |
| DNA | 534 | MG3- | GATATAACATCACAGTAGACAT |
| sequence | | 6/3-4 | |
| of | | ANGPTL3 | |
| ANGPTL3 | | A8 | |
| target | | | |
| site | | | |
| DNA | 535 | MG3- | CACTTGTATGTTCACCTCTGTT |
| sequence | | 6/3-4 | |
| of | | ANGPTL3 | |
| ANGPTL3 | | B8 | |
| target | | | |
| site | | | |
| DNA | 536 | MG3- | TATAAATGGTGGTACATTCAGC |
| sequence | | 6/3-4 | |
| of | | ANGPTL3 | |
| ANGPTL3 | | C8 | |
| target | | | |
| site | | | |
| DNA | 537 | MG3- | TGGTACATTCAGCAGGAATGCC |
| sequence | | 6/3-4 | |
| of | | ANGPTL3 | |
| ANGPTL3 | | D8 | |
| target | | | |
| site | | | |
| DNA | 538 | MG3- | GTCCATGGACATTAATTCAACA |
| sequence | | 6/3-4 | |
| of | | ANGPTL3 | |
| ANGPTL3 | | E8 | |
| target | | | |
| site | | | |
| DNA | 539 | MG3- | TTCAACATCGAATAGATGGATC |
| sequence | | 6/3-4 | |
| of | | ANGPTL3 | |
| ANGPTL3 | | F8 | |
| target | | | |
| site | | | |
| DNA | 540 | MG3- | ATAGATGGATCACAAAACTTCA |
| sequence | | 6/3-4 | |
| of | | ANGPTL3 | |
| ANGPTL3 | | G8 | |
| target | | | |
| site | | | |
| DNA | 541 | MG3- | TTCAATGAAACGTGGGAGAACT |
| sequence | | 6/3-4 | |
| of | | ANGPTL3 | |
| ANGPTL3 | | H8 | |
| target | | | |
| site | | | |
| DNA | 542 | MG3- | AGTCCCCTTACCATCAAGCCTC |
| sequence | | 6/3-4 | |
| of | | ANGPTL3 | |
| ANGPTL3 | | A9 | |
| target | | | |
| site | | | |
| DNA | 543 | MG3- | TTTGTGATCCATCTATTCGATG |
| sequence | | 6/3-4 | |
| of | | ANGPTL3 | |
| ANGPTL3 | | B9 | |
| target | | | |
| site | | | |
| DNA | 544 | MG3- | TGAATTAATGTCCATGGACTAC |
| sequence | | 6/3-4 | |
| of | | ANGPTL3 | |
| ANGPTL3 | | C9 | |
| target | | | |
| site | | | |
| DNA | 545 | MG3- | TTTACGAATTGAGTTGGAAGAC |
| sequence | | 6/3-4 | |
| of | | ANGPTL3 | |
| ANGPTL3 | | D9 | |
| target | | | |
| site | | | |
| DNA | 546 | MG3- | GGCAATGTCCCCAATGCAATCC |
| sequence | | 6/3-4 | |
| of | | ANGPTL3 | |
| ANGPTL3 | | E9 | |
| target | | | |
| site | | | |
| DNA | 547 | MG3- | GCAATGTCCCCAATGCAATCCC |
| sequence | | 6/3-4 | |
| of | | ANGPTL3 | |
| ANGPTL3 | | F9 | |
| target | | | |
| site | | | |
| DNA | 548 | MG3- | GTTTTCTACTTGGGATCACAAA |
| sequence | | 6/3-4 | |
| of | | ANGPTL3 | |
| ANGPTL3 | | G9 | |
| target | | | |
| site | | | |
| DNA | 549 | MG3- | CCTTTTGCTTTGTGATCCCAAG |
| sequence | | 6/3-4 | |
| of | | ANGPTL3 | |
| ANGPTL3 | | H9 | |
| target | | | |
| site | | | |
| DNA | 550 | MG3- | CTTTTGCTTTGTGATCCCAAGT |
| sequence | | 6/3-4 | |
| of | | ANGPTL3 | |
| ANGPTL3 | | A10 | |
| target | | | |
| site | | | |
| DNA | 551 | MG3- | TTGTGATCCCAAGTAGAAAACA |
| sequence | | 6/3-4 | |
| of | | ANGPTL3 | |
| ANGPTL3 | | B10 | |
| target | | | |
| site | | | |
| DNA | 552 | MG3- | AGTTGGTTTCGTGATTTCCCAA |
| sequence | | 6/3-4 | |
| of | | ANGPTL3 | |
| ANGPTL3 | | C10 | |
| target | | | |
| site | | | |
| DNA | 553 | MG3- | GTTGGTTTCGTGATTTCCCAAG |
| sequence | | 6/3-4 | |
| of | | ANGPTL3 | |
| ANGPTL3 | | D10 | |
| target | | | |
| site | | | |
| DNA | 554 | MG3- | GTTTCGTGATTTCCCAAGTAAA |
| sequence | | 6/3-4 | |
| of | | ANGPTL3 | |
| ANGPTL3 | | E10 | |
| target | | | |
| site | | | |
| DNA | 555 | MG3- | TTCCAGTCTTCCAACTCAATTC |
| sequence | | 6/3-4 | |
| of | | ANGPTL3 | |
| ANGPTL3 | | F10 | |
| target | | | |
| site | | | |
| DNA | 556 | MG3- | AGTATATCTTCTCTAGGCCCAA |
| sequence | | 6/3-4 | |
| of | | ANGPTL3 | |
| ANGPTL3 | | G10 | |
| target | | | |
| site | | | |
| DNA | 557 | MG3- | GTATATCTTCTCTAGGCCCAAC |
| sequence | | 6/3-4 | |
| of | | ANGPTL3 | |
| ANGPTL3 | | H10 | |
| target | | | |
| site | | | |
| DNA | 558 | MG3- | TCTAGGCCCAACCAAAATTCTC |
| sequence | | 6/3-4 | |
| of | | ANGPTL3 | |
| ANGPTL3 | | A11 | |
| target | | | |
| site | | | |
| DNA | 559 | MG3- | CTAGGCCCAACCAAAATTCTCC |
| sequence | | 6/3-4 | |
| of | | ANGPTL3 | |
| ANGPTL3 | | B11 | |
| target | | | |
| site | | | |
| DNA | 560 | MG3- | GCCCAACCAAAATTCTCCTGAA |
| sequence | | 6/3-4 | |
| of | | ANGPTL3 | |
| ANGPTL3 | | C11 | |
| target | | | |
| site | | | |
| DNA | 561 | MG3- | TGGTGGTGGCATGATGAGTGTG |
| sequence | | 6/3-4 | |
| of | | ANGPTL3 | |
| ANGPTL3 | | D11 | |
| target | | | |
| site | | | |
| DNA | 562 | MG3- | GGTGGTGGCATGATGAGTGTGG |
| sequence | | 6/3-4 | |
| of | | ANGPTL3 | |
| ANGPTL3 | | E11 | |
| target | | | |
| site | | | |
| DNA | 563 | MG3- | TGATGAGTGTGGAGAAAACAAC |
| sequence | | 6/3-4 | |
| of | | ANGPTL3 | |
| ANGPTL3 | | F11 | |
| target | | | |
| site | | | |
| DNA | 564 | MG3- | TGTGGAGAAAACAACCTAAATG |
| sequence | | 6/3-4 | |
| of | | ANGPTL3 | |
| ANGPTL3 | | G11 | |
| target | | | |
| site | | | |
| DNA | 565 | MG3- | GGTAAATATAACAAACCAAGAG |
| sequence | | 6/3-4 | |
| of | | ANGPTL3 | |
| ANGPTL3 | | H11 | |
| target | | | |
| site | | | |
| DNA | 566 | MG3- | GAAGAGGATTATCTTGGAAGTC |
| sequence | | 6/3-4 | |
| of | | ANGPTL3 | |
| ANGPTL3 | | A12 | |
| target | | | |
| site | | | |
| DNA | 567 | MG3- | AAGAGGATTATCTTGGAAGTCT |
| sequence | | 6/3-4 | |
| of | | ANGPTL3 | |
| ANGPTL3 | | B12 | |
| target | | | |
| site | | | |
| DNA | 568 | MG3- | TCAAAATGGAAGGTTATACTCT |
| sequence | | 6/3-4 | |
| of | | ANGPTL3 | |
| ANGPTL3 | | C12 | |
| target | | | |
| site | | | |
| DNA | 569 | MG3- | CAAAATGGAAGGTTATACTCTA |
| sequence | | 6/3-4 | |
| of | | ANGPTL3 | |
| ANGPTL3 | | D12 | |
| target | | | |
| site | | | |
| DNA | 570 | MG3- | ATGTTGATCCATCCAACAGATT |
| sequence | | 6/3-4 | |
| of | | ANGPTL3 | |
| ANGPTL3 | | E12 | |
| target | | | |
| site | | | |
| DNA | 571 | MG3- | CATCCAACAGATTCAGAAAGCT |
| sequence | | 6/3-4 | |
| of | | ANGPTL3 | |
| ANGPTL3 | | F12 | |
| target | | | |
| site | | | |
| DNA | 572 | MG3- | GCCTCAGTTCATTCAAAGCTTT |
| sequence | | 6/3-4 | |
| of | | ANGPTL3 | |
| ANGPTL3 | | G12 | |
| target | | | |
| site | | | |

(r = native ribose base, m = 2′-O methyl modified base, F = 2′ Fluro modified base, * = phosphorothioate bond)

### Example 17—Analysis of Gene-Editing Outcomes at the DNA Level for PCSK9 in Hep3B Cells

[0403] Nucleofection of MG3-6/4 RNPs (104 pmol protein/120 pmol guide) comprising sgRNAs described below in Table 9E below and SEQ ID NOs: 573-602 was performed into Hep3B cells (100,000) using electroporation. Cells were harvested and genomic DNA prepared three days post-transfection. PCR primers appropriate for use in NGS-based DNA sequencing were generated, optimized, and used to amplify the individual target sequences for each guide RNA. The amplicons were sequenced and analyzed to determine gene editing (FIG. 22). Results indicate that the highest editing performance was achieved with sgRNAs B1, F1, A2, and E2, with appreciable editing also occurring with D2, C2, B2, H1, and F2.

TABLE 9E
gRNAs and Targeting Sequences Used in Example 17

| | SEQ | | |
|---|---|---|---|
| | ID | | |
| Category | NO: | Name | Sequence |
| MG3-6/3- | 573 | MG3- | mA*mC*mC*rCrCrUrCrCrArCrGrGrUrArCrCrGrGrGrCrGrGrGrUrU |
| 4 sgRNA | | 6/3-4 | rGrArGrArArUrCrGrArArArGrArUrUrCrUrUrArArUrArArGrGrCr |
| targeting | | PCSK9 | ArUrCrCrUrUrCrCrGrArUrGrCrUrGrArCrUrUrCrUrCrArCrCrGrU |
| PCSK9 | | A1 | rCrCrGrUrUrUrUrCrCrArArUrArGrGrArGrCrGrGrGrCrGrGrUrAr |
| | | | UrGrU*mU*mU*mU |
| MG3-6/3- | 574 | MG3- | mA*mC*mC*rArGrCrArUrArCrArGrArGrUrGrArCrCrArCrCrGrUrU |
| 4 sgRNA | | 6/3-4 | rGrArGrArArUrCrGrArArArGrArUrUrCrUrUrArArUrArArGrGrCr |
| targeting | | PCSK9 | ArUrCrCrUrUrCrCrGrArUrGrCrUrGrArCrUrUrCrUrCrArCrCrGrU |
| PCSK9 | | B1 | rCrCrGrUrUrUrUrCrCrArArUrArGrGrArGrCrGrGrGrCrGrGrUrAr |
| | | | UrGrU*mU*mU*mU |
| MG3-6/3- | 575 | MG3- | mC*mC*mA*rGrCrArUrArCrArGrArGrUrGrArCrCrArCrCrGrGrUrU |
| 4 sgRNA | | 6/3-4 | rGrArGrArArUrCrGrArArArGrArUrUrCrUrUrArArUrArArGrGrCr |
| targeting | | PCSK9 | ArUrCrCrUrUrCrCrGrArUrGrCrUrGrArCrUrUrCrUrCrArCrCrGrU |
| PCSK9 | | C1 | rCrCrGrUrUrUrUrCrCrArArUrArGrGrArGrCrGrGrGrCrGrGrUrAr |
| | | | UrGrU*mU*mU*mU |
| MG3-6/3- | 576 | MG3- | mC*mA*mG*rGrGrUrCrArUrGrGrUrCrArCrCrGrArCrUrUrCrGrUrU |
| 4 sgRNA | | 6/3-4 | rGrArGrArArUrCrGrArArArGrArUrUrCrUrUrArArUrArArGrGrCr |
| targeting | | PCSK9 | ArUrCrCrUrUrCrCrGrArUrGrCrUrGrArCrUrUrCrUrCrArCrCrGrU |
| PCSK9 | | D1 | rCrCrGrUrUrUrUrCrCrArArUrArGrGrArGrCrGrGrGrCrGrGrUrAr |
| | | | UrGrU*mU*mU*mU |
| MG3-6/3- | 577 | MG3- | mC*mC*mU*rCrCrCrArGrGrCrCrUrGrGrArGrUrUrUrArUrUrGrUrU |
| 4 sgRNA | | 6/3-4 | rGrArGrArArUrCrGrArArArGrArUrUrCrUrUrArArUrArArGrGrCr |
| targeting | | PCSK9 | ArUrCrCrUrUrCrCrGrArUrGrCrUrGrArCrUrUrCrUrCrArCrCrGrU |
| PCSK9 | | E1 | rCrCrGrUrUrUrUrCrCrArArUrArGrGrArGrCrGrGrGrCrGrGrUrAr |
| | | | UrGrU*mU*mU*mU |
| MG3-6/3- | 578 | MG3- | mC*mU*mC*rCrCrArGrGrCrCrUrGrGrArGrUrUrUrArUrUrCrGrUrU |
| 4 sgRNA | | 6/3-4 | rGrArGrArArUrCrGrArArArGrArUrUrCrUrUrArArUrArArGrGrCr |
| targeting | | PCSK9 | ArUrCrCrUrUrCrCrGrArUrGrCrUrGrArCrUrUrCrUrCrArCrCrGrU |
| PCSK9 | | F1 | rCrCrGrUrUrUrUrCrCrArArUrArGrGrArGrCrGrGrGrCrGrGrUrAr |
| | | | UrGrU*mU*mU*mU |
| MG3-6/3- | 579 | MG3- | mC*mA*mG*rGrCrUrGrGrArCrCrArGrCrUrGrGrCrUrUrUrUrGrUrU |
| 4 sgRNA | | 6/3-4 | rGrArGrArArUrCrGrArArArGrArUrUrCrUrUrArArUrArArGrGrCr |
| targeting | | PCSK9 | ArUrCrCrUrUrCrCrGrArUrGrCrUrGrArCrUrUrCrUrCrArCrCrGrU |
| PCSK9 | | G1 | rCrCrGrUrUrUrUrCrCrArArUrArGrGrArGrCrGrGrGrCrGrGrUrAr |
| | | | UrGrU*mU*mU*mU |
| MG3-6/3- | 580 | MG3- | mG*mG*mU*rGrGrCrCrCrCrArArCrUrGrUrGrArUrGrArCrCrGrUrU |
| 4 sgRNA | | 6/3-4 | rGrArGrArArUrCrGrArArArGrArUrUrCrUrUrArArUrArArGrGrCr |
| targeting | | PCSK9 | ArUrCrCrUrUrCrCrGrArUrGrCrUrGrArCrUrUrCrUrCrArCrCrGrU |
| PCSK9 | | H1 | rCrCrGrUrUrUrUrCrCrArArUrArGrGrArGrCrGrGrGrCrGrGrUrAr |
| | | | UrGrU*mU*mU*mU |
| MG3-6/3- | 581 | MG3- | mG*mC*mC*rCrCrGrCrCrGrCrUrUrCrCrCrArCrUrCrCrUrGrGrUrU |
| 4 sgRNA | | 6/3-4 | rGrArGrArArUrCrGrArArArGrArUrUrCrUrUrArArUrArArGrGrCr |
| | | | ArUrCrCrUrUrCrCrGrArUrGrCrUrGrArCrUrUrCrUrCrArCrCrGrU |
| targeting | | PCSK9 | rCrCrGrUrUrUrUrCrCrArArUrArGrGrArGrCrGrGrGrCrGrGrUrAr |
| PCSK9 | | A2 | UrGrU*mU*mU*mU |
| MG3-6/3- | 582 | MG3- | mA*mG*mU*rGrUrGrCrUrGrArCrCrArUrArCrArGrUrCrCrUrGrUrU |
| 4 sgRNA | | 6/3-4 | rGrArGrArArUrCrGrArArArGrArUrUrCrUrUrArArUrArArGrGrCr |
| targeting | | PCSK9 | ArUrCrCrUrUrCrCrGrArUrGrCrUrGrArCrUrUrCrUrCrArCrCrGrU |
| PCSK9 | | B2 | rCrCrGrUrUrUrUrCrCrArArUrArGrGrArGrCrGrGrGrCrGrGrUrAr |
| | | | UrGrU*mU*mU*mU |
| MG3-6/3- | 583 | MG3- | mC*mC*mU*rGrCrArArArArCrArGrCrUrGrCrCrArArCrCrUrGrUrU |
| 4 sgRNA | | 6/3-4 | rGrArGrArArUrCrGrArArArGrArUrUrCrUrUrArArUrArArGrGrCr |
| targeting | | PCSK9 | ArUrCrCrUrUrCrCrGrArUrGrCrUrGrArCrUrUrCrUrCrArCrCrGrU |
| PCSK9 | | C2 | rCrCrGrUrUrUrUrCrCrArArUrArGrGrArGrCrGrGrGrCrGrGrUrAr |
| | | | UrGrU*mU*mU*mU |
| MG3-6/3- | 584 | MG3- | mC*mU*mG*rCrArArArArCrArGrCrUrGrCrCrArArCrCrUrGrGrUrU |
| 4 sgRNA | | 6/3-4 | rGrArGrArArUrCrGrArArArGrArUrUrCrUrUrArArUrArArGrGrCr |
| targeting | | PCSK9 | ArUrCrCrUrUrCrCrGrArUrGrCrUrGrArCrUrUrCrUrCrArCrCrGrU |
| PCSK9 | | D2 | rCrCrGrUrUrUrUrCrCrArArUrArGrGrArGrCrGrGrGrCrGrGrUrAr |
| | | | UrGrU*mU*mU*mU |
| MG3-6/3- | 585 | MG3- | mA*mA*mU*rGrGrCrGrUrArGrArCrArCrCrCrUrCrArCrCrCrGrUrU |
| 4 sgRNA | | 6/3-4 | rGrArGrArArUrCrGrArArArGrArUrUrCrUrUrArArUrArArGrGrCr |
| targeting | | PCSK9 | ArUrCrCrUrUrCrCrGrArUrGrCrUrGrArCrUrUrCrUrCrArCrCrGrU |
| PCSK9 | | E2 | rCrCrGrUrUrUrUrCrCrArArUrArGrGrArGrCrGrGrGrCrGrGrUrAr |
| | | | UrGrU*mU*mU*mU |
| MG3-6/3- | 586 | MG3- | mUmC*mC*rUrGrCrUrGrCrCrArUrGrCrCrCrCrArGrGrUrCrGrUrU |
| 4 sgRNA | | 6/3-4 | rGrArGrArArUrCrGrArArArGrArUrUrCrUrUrArArUrArArGrGrCr |
| targeting | | PCSK9 | ArUrCrCrUrUrCrCrGrArUrGrCrUrGrArCrUrUrCrUrCrArCrCrGrU |
| PCSK9 | | F2 | rCrCrGrUrUrUrUrCrCrArArUrArGrGrArGrCrGrGrGrCrGrGrUrAr |
| | | | UrGrU*mU*mU*mU |
| MG3-6/3- | 587 | MG3- | mU*mG*mG*rArArUrGrCrArArArGrUrCrArArGrGrArGrCrArGrUrU |
| 4 sgRNA | | 6/3-4 | rGrArGrArArUrCrGrArArArGrArUrUrCrUrUrArArUrArArGrGrCr |
| targeting | | PCSK9 | ArUrCrCrUrUrCrCrGrArUrGrCrUrGrArCrUrUrCrUrCrArCrCrGrU |
| PCSK9 | | G2 | rCrCrGrUrUrUrUrCrCrArArUrArGrGrArGrCrGrGrGrCrGrGrUrAr |
| | | | UrGrU*mU*mU*mU |
| DNA | 588 | MG3- | ACCCCTCCACGGTACCGGGCGG |
| sequence | | 6/3-4 | |
| of | | PCSK9 | |
| PCSK9 | | A1 | |
| target site | | | |
| DNA | 589 | MG3- | ACCAGCATACAGAGTGACCACC |
| sequence | | 6/3-4 | |
| of | | PCSK9 | |
| PCSK9 | | B1 | |
| target site | | | |
| DNA | 590 | MG3- | CCAGCATACAGAGTGACCACCG |
| sequence | | 6/3-4 | |
| of | | PCSK9 | |
| PCSK9 | | C1 | |
| target site | | | |
| DNA | 591 | MG3- | CAGGGTCATGGTCACCGACTTC |
| sequence | | 6/3-4 | |
| of | | PCSK9 | |
| PCSK9 | | D1 | |
| target site | | | |
| DNA | 592 | MG3- | CCTCCCAGGCCTGGAGTTTATT |
| sequence | | 6/3-4 | |
| of | | PCSK9 | |
| PCSK9 | | E1 | |
| target site | | | |
| DNA | 593 | MG3- | CTCCCAGGCCTGGAGTTTATTC |
| sequence | | 6/3-4 | |
| of | | PCSK9 | |
| PCSK9 | | F1 | |
| target site | | | |
| DNA | 594 | MG3- | CAGGCTGGACCAGCTGGCTTTT |
| sequence | | 6/3-4 | |
| of | | PCSK9 | |
| PCSK9 | | G1 | |
| target site | | | |
| DNA | 595 | MG3- | GGTGGCCCCAACTGTGATGACC |
| sequence | | 6/3-4 | |
| of | | PCSK9 | |
| PCSK9 | | H1 | |
| target site | | | |
| DNA | 596 | MG3- | GCCCCGCCGCTTCCCACTCCTG |
| sequence | | 6/3-4 | |
| of | | PCSK9 | |
| PCSK9 | | A2 | |
| target site | | | |
| DNA | 597 | MG3- | AGTGTGCTGACCATACAGTCCT |
| sequence | | 6/3-4 | |
| of | | PCSK9 | |
| PCSK9 | | B2 | |
| target site | | | |
| DNA | 598 | MG3- | CCTGCAAAACAGCTGCCAACCT |
| sequence | | 6/3-4 | |
| of | | PCSK9 | |
| PCSK9 | | C2 | |
| target site | | | |
| DNA | 599 | MG3- | CTGCAAAACAGCTGCCAACCTG |
| sequence | | 6/3-4 | |
| of | | PCSK9 | |
| PCSK9 | | D2 | |
| target site | | | |
| DNA | 600 | MG3- | AATGGCGTAGACACCCTCACCC |
| sequence | | 6/3-4 | |
| of | | PCSK9 | |
| PCSK9 | | E2 | |
| target site | | | |
| DNA | 601 | MG3- | TCCTGCTGCCATGCCCCAGGTC |
| sequence | | 6/3-4 | |
| of | | PCSK9 | |
| PCSK9 | | F2 | |
| target site | | | |
| DNA | 602 | MG3- | TGGAATGCAAAGTCAAGGAGCA |
| sequence | | 6/3-4 | |
| of | | PCSK9 | |
| PCSK9 | | G2 | |
| target site | | | |
| bond) | | | |

(r = native ribose base, m = 2′-O methyl modified base, F = 2′ Fluro modified base, * = phosphorothioate

### Example 18—In Vivo Gene Editing in the Liver of Mice by the Chimeric Nuclease MG3-6/3-4 Delivered by Systemic Administration of a Lipid Nanoparticle

[0404] To evaluate the ability of the MG3-6/3-4 chimeric Type II nuclease to edit the genome in vivo in a living animal, a lipid nanoparticle was used to deliver an mRNA encoding the MG3-6/3-4 nuclease (e.g., RNA version of SEQ ID NO: 603) and single guide RNAs (sgRNA) that target different parts of the coding sequence of the mouse HAO-1 gene (e.g., described in Table 10). The HAO-1 gene encodes glycolate oxidase which is an enzyme involved in glycolate metabolism and is expressed primarily in hepatocytes in the liver. A screen of sgRNAs that target the HAO-1 coding sequence was performed in the mouse liver cell line Hepa1-6 to identify active guides. The sgRNAs mH364-7 and mH364-20, which exhibited 46% and 26% editing in Hepa1-6 cells when transfected with the mRNA encoding the MG3-6/3-4 nuclease, were selected for testing in mice. mH364-7 targets exon 2 and mH364-20 targets exon 4.

[0405] A number of chemical modifications of the native RNA structure were incorporated into these sgRNAs. These chemical modifications were selected based on their ability to improve the stability of the sgRNA in vitro when incubated in extracts from mammalian cells without negatively impacting editing activity. For initial testing in mice, sgRNAs mH364-7 and mH364-20 incorporating chemistry 1 and chemistry 35 were selected for testing and designated as mH364-7-1, mH364-20-1, mH364-7-35, mH364-20-35. The sequences of these guides including the chemical modifications are shown below in Table 10.

TABLE 10
Sequences and chemical modifications of guide RNA tested in vivo in mice

| Guide name | Sequence | SEQ ID NO: |
|---|---|---|
| mH364-7-1 | mG*mA*mG*CUGGCCACUGUGCGAGGUAGUU | 1795 |
| | GAGAAUCGAAAGAUUCUUAAUAAGGCAUCC | |
| | UUCCGAUGCUGACUUCUCACCGUCCGUUUUC | |
| | CAAUAGGAGCGGGCGGUAUGU*mU*mU*mU | |
| mH364-20-1 | mU*mU*mC*AGCAAGUCCACUGUUGUCUGUU | 1808 |
| | GAGAAUCGAAAGAUUCUUAAUAAGGCAUCC | |
| | UUCCGAUGCUGACUUCUCACCGUCCGUUUUC | |
| | CAAUAGGAGCGGGCGGUAUGU*mU*mU*mU | |
| mH364-7-35 | mG*mA*mG*mC*UGGCCACUGUGCGAGGUAG | 1816 |
| | UUGAGAAUCmG*mA*mA*mA*GAUUCUUAAU | |
| | AAGGCAUCmC*mU*mU*mC*mC*GAUGCUGAC | |
| | UUCUCACCGUCCGUUUUCCmA*mA*mU*mA*G | |
| | GAGCGGGCGGUA*mU*mG*mU*mU*mU*mU | |
| mH364-20-35 | mU*mU*mC*mA*GCAAGUCCACUGUUGUCUG | 1826 |
| | UUGAGAAUCmG*mA*mA*mA*GAUUCUUAAU | |
| | AAGGCAUCmC*mU*mU*mC*mC*GAUGCUGAC | |
| | UUCUCACCGUCCGUUUUCCmA*mA*mU*mA*G | |
| | GAGCGGGCGGUA*mU*mG*mU*mU*mU*mU | |

m: 2′-O methyl modified base, *: phosphorothioate backbone

[0406] The mRNA encoding the MG3-6/3-4 nuclease was generated by in vitro transcription of a linearized plasmid template using T7 RNA polymerase, nucleotides, and enzymes.

[0407] The DNA sequence (SEQ ID NO: 603) that was transcribed into RNA comprised the following elements in order from 5′ to 3′: the T7 RNA polymerase promoter, a 5′ untranslated region (5′ UTR), a nuclear localization signal, a short linker, the coding sequence for the MG3-6/3-4 nuclease, a short linker, a nuclear localization signal, and a 3′ untranslated region and an approximately 100 nucleotide polyA tail (SEQ ID NO: 2865) (not included in SEQ ID No: 603).

[0408] The protein sequence encoded in the synthetic mRNA encoded in this MG3-6/3-4 cassette comprises the following elements from 5′ to 3′: the nuclear localization signal from SV40, a five amino acid linker (GGGGS (SEQ ID NO: 2864)), the protein coding sequence of the MG3-6/3-4 nuclease from which the initiating methionine codon was removed, a 3 amino acid linker (SGG) and the nuclear localization signal from nucleoplasmin. The DNA sequence of the protein coding region of this cassette was modified to reflect the codon usage in humans. An approximately 100-nucleotide polyA tail (SEQ ID NO: 2865) was encoded in the plasmid used for in vitro transcription and the mRNA was co-transcriptionally capped. Uridine in the mRNA was replaced with N1-methyl pseudouridine.

[0409] The lipid nanoparticle (LNP) formulation used to deliver the MG3-6/3-4 mRNA and the guide RNA comprised 4 lipid components. The four lipid components were dissolved in ethanol and mixed in an appropriate molar ratio to make the lipid working mix. The mRNA and the guide RNA were either mixed prior to formulation at a 1:1 mass ratio or formulated in separate LNP that were later co-injected into mice at a 1:1 mass ratio of the two RNA's. In either case, the RNA was diluted in 100 mM Sodium Acetate (pH 4.0) to make the RNA working stock. The lipid working stock and the RNA working stock were mixed in a microfluidics device at a flow rate ratio of 1:3, respectively and a flow rate of 12 mLs/min. The LNP were dialyzed against phosphate buffered saline (PBS) for 2 to 16 hours and then concentrated until the desired reduced volume was achieved. The concentration of RNA in the LNP formulation was measured using the Ribogreen reagent. The diameter and polydispersity (PDI) of the LNP were determined by dynamic light scattering. Representative LNP had diameters ranged from 65 nm to 120 nm with PDI of 0.05 to 0.20. LNP were injected intravenously into 8- to 12-week-old C57B16 wild type mice via the tail vein (0.1 mL per mouse) at a total RNA dose of 1 mg RNA per kg body weight. Eleven days post-dosing, 3 of the 5 mice in each group were sacrificed and the liver was collected and homogenized using a bead beater in a digestion buffer. Genomic DNA was purified from the resulting homogenate and quantified by measuring the absorbance at 260 nm. Genomic DNA purified from mice injected with buffer alone was used as a control. At 28 days post-dosing, the remaining 2 mice in each group were sacrificed and the liver was collected and homogenized using a bead beater in a digestion buffer. Genomic DNA was purified from the resulting homogenate and quantified by measuring the absorbance at 260 nm. Genomic DNA purified from mice injected with buffer alone was used as a control.

[0410] The liver genomic DNA was then PCR amplified using a first set of primers flanking the region targeted by the two guides. The PCR primers used are shown below in Table 11.

TABLE 11
Sequences of PCR primers and Next Generation Sequencing primers used to
analyze in vivo genome editing in mice

| Primer Set | | | |
|---|---|---|---|
| Name | Purpose | Left Primer Sequence | Right Primer Sequence |
| mHAO1-NGS- | Amplify the | GTAAAGAAAAACAAG | ATCTGTCAACTTCTG |
| P4 | target site in | GAATGTAAT (SEQ ID | TTTTAGGAC (SEQ ID |
| | HAO1 exon 2 | NO: 2866) | NO: 2868) |
| | for guide | | |
| | mH364-7 | | |
| mHAO1-NGS- | Amplify the | GCAAAGTAGAGAAATG | ACCAAGTCAGATATA |
| P5 | target site in | ACAAACC (SEQ ID NO: | AACTGTCT (SEQ ID |
| | HAO1 exon 4 | 2867) | NO: 2869) |
| | for guide | | |
| | mH364-20 | | |

[0411] The 5′ end of these primers comprise conserved regions complementary to the PCR primers used in the second PCR, followed by 5 Ns in order to give sequence diversity and improve sequencing quality, and end with sequences complementary to the target region in the mouse genome. PCR was performed using 100 ng of genomic DNA and an annealing temperature of 60° C. for a total of 30 cycles. This was followed by a 2nd round of 10 cycles of PCR using primers designed to add unique dual barcodes for next generation sequencing. Each sample was sequenced to a depth of greater than 10,000 reads using 150 bp paired end reads. Reads were merged to generate a single 250 bp sequence from which Indel percentage and INDEL profile was calculated.

[0412] The results of the NGS analysis of INDELS from mice at day 11 post dosing are shown in Table 12 for individual mice and are summarized in FIG. 23.

TABLE 12
Genome editing at the HAO-1 locus by MG3-6/3-4 in
the whole liver of wild type mice at day 11 post
LNP dosing analyzed by next generation sequencing.

| | | | | | | Mean |
|---|---|---|---|---|---|---|
| | | Total | | % of | | total |
| Animal | | NGS | Indel | Indels | Mean | OOF |
| # | Guide RNA | reads | % | OOF | INDELS | % |
| 1 | PBS control | 210962 | 0.09 | 100 | 0.2 | 0.2 |
| 2 | PBS control | 259982 | 0.29 | 99.87 | | |
| 3 | PBS control | 211193 | 0.08 | 100 | | |
| 6 | 364mHA-G7-1 | 164396 | 54.06 | 87.02 | 53.0 | 46.0 |
| 7 | 364mHA-G7-1 | 163409 | 51.93 | 85.9 | | |
| 8 | 364mHA-G7-1 | 183054 | 52.94 | 87.6 | | |
| 11 | 364mHA-G7-35 | 38835 | 22.71 | 91.57 | 23.6 | 21.1 |
| 12 | 364mHA-G7-35 | 269963 | 26.83 | 89.59 | | |
| 13 | 364mHA-G7-35 | 190007 | 21.32 | 87.11 | | |
| 16 | 364mHA-G20-1 | 227766 | 8.53 | 88.62 | 8.9 | 7.5 |
| 17 | 364mHA-G20-1 | 202915 | 5.01 | 90.36 | | |
| 18 | 364mHA-G20-1 | 236757 | 13.06 | 80.52 | | |
| 21 | 364mHA-G20-35 | 177059 | 2.78 | 80.98 | 2.5 | 2.0 |
| 22 | 364mHA-G20-35 | 163515 | 2.29 | 67.62 | | |
| 23 | 364mHA-G20-35 | 136634 | 2.31 | 89.32 | | |

Data for individual mice is shown. All mice that received guide RNA LNP also received LNP encapsulating the MG3-6/3-4 mRNA. % of indels OOF is the percentage of all the INDELS that resulted in a sequence where the HAO1 coding sequence is out of frame. The mean total OOF % is the average percentage of all alleles in which the HAO1 coding sequence is out of frame. The total number of NGS sequencing reads is given.

[0413] Group 2 mice received LNP encapsulating guide RNA mH364-7-1. Group 3 mice received LNP encapsulating guide RNAmH364-7-35. Group 4 mice received LNP encapsulating guide RNA mH364-20-1. Group 5 mice received LNP encapsulating guide RNAmH364-20-35. All mice in groups 2 to 5 also received LNP encapsulating the MG3-6/3-4 mRNA that was mixed with the guide RNA containing LNP at a 1:1 RNA mass ratio prior to injection. No INDELS were detected in the liver of mice injected with PBS buffer (see Table 12). Mice injected with LNPs encapsulating guide 364mHA-G7-1 and MG3-6/3-4 mRNA exhibited INDELS at the target site in HAO-1 at a mean frequency of 53.0%. Mice injected with LNPs encapsulating guide 364mHA-G7-35 and MG3-6/3-4 mRNA exhibited INDELS at the target site in HAO-1 at a mean frequency of 23.6%. Mice injected with LNPs encapsulating guide 364mHA-G20-1 and MG3-6/3-4 mRNA exhibited INDELS at the target site in HAO-1 at a mean frequency of 8.9%. Mice injected with LNPs encapsulating guide 364mHA-G20-35 and MG3-6/3-4 mRNA exhibited indels at the target site in HAO-1 at a mean frequency of 2.5%. These data demonstrate that the guides with spacer 7 (364mHA-G7-1 and 364mHA-G7-35) are significantly more potent in vivo than the guides with spacer 20 (364mHA-G20-1 and 364mHA-G20-35) when guides with the same chemical modifications are compared. This is consistent with the higher level of editing observed with these 2 guide sequences in Hepa1-6 cells by mRNA-based transfection (mH364-7 exhibited 46% INDELS and mH364-20 26% INDELS in Hepa1-6 cells). Guide chemistry #1 resulted in higher levels of editing than chemistry #35 for both guide 7 (2.2-fold higher editing with chemistry #1) and guide 20 (3.5-fold higher editing with chemistry #1). These data demonstrate that the MG3-6/3-4 nuclease can edit in vivo in mice at the target site specified by the sgRNA. Moreover, an sgRNA with a set of chemical modifications designated chemistry #1 was able to promote editing at 53% of the genomic DNA in whole liver when delivered using an LNP. The LNP used in these studies is taken up via binding of apolipoprotein E (apoE) to the LNP which is a ligand for binding to the low-density lipoprotein receptor.

[0414] The liver is composed of a number of different cell types. In the liver of mice, the hepatocytes make up about 52% of all cells (and 35% of hepatocytes contain two nuclei), with Kupffer cells (18%), Ito cells (8%), and endothelial cells (22%) making up the remaining cells. By extrapolation, without wishing to be bound by theory, about 60% [((52+(0.35×52))/(48+(52+(0.35×52)))] of the total nuclei in the mouse liver are predicted to be derived from hepatocytes. Because the LDL receptor is expressed mainly on hepatocytes in the liver the LNP used in the mouse studies described herein is expected to be taken up primarily by hepatocytes. Because hepatocyte nuclei make up about 60% of all nuclei in the whole liver of mice, it can be predicted that if all the hepatocyte nuclei were edited, the level of INDELS measured in the whole liver are predicted to be about 60%. The finding that LNP delivery of MG3-6/3-4 was able to achieve INDEL rates of 53% suggests that the majority of hepatocyte nuclei were edited.

[0415] The HAO1 gene encodes the protein glycolate oxidase (GO), an intracellular enzyme involved in glycolate metabolism. To determine if the observed gene editing in the HAO1 gene resulted in a reduction in the expression of the GO protein in the liver, total protein from a separate lobe of the liver was extracted from mice in the same study. The GO protein was detected using a Western blot assay with commercially available antibodies against the mouse GO protein. The protein vinculin was used as a loading control on the Western blot, as Vinculin levels are predicted to not be impacted by gene editing of the HAO1 gene. As shown in FIG. 24, the level of GO protein was significantly reduced in the livers of mice treated with LNP encapsulating MG3-6/3-4 mRNA and sgRNA targeting HAO1. Quantification of the Western blot using image analysis software and normalization of GO to the level of vinculin demonstrated that GO levels were reduced by an average of 75%, 58%, 4%, and 24% in mice treated with sgRNA mH364-7-1, mH364-7-35, mH364-20-1, and mH364-20-35, respectively. The degree of GO protein reduction correlates with the INDEL frequency in these groups of mice (see Table 12). These data demonstrate that the MG3-6/3-4 nuclease combined with an appropriately designed sgRNA can be used to create indels in a gene of interest in vivo in a living mammal and reduce (knockdown) the production of the protein encoded by that gene. Reducing the expression of specific genes can be therapeutically beneficial in specific diseases. In the case of the HAO1 gene that encodes the GO protein, reduction of the levels of GO protein in the liver is expected to be beneficial in patients with the hereditary disease primary hyperoxaluria type I. Thus, the MG3-6/3-4 nuclease, together with an appropriate sgRNA containing appropriate chemical modifications targeting the HAO1 gene, is a potential approach for the treatment of primary hyperoxaluria type I.

### Example 19—Comparison of MG3-6/3-4 Gene Editing Efficiency in Mice Using the Same Guide RNA Sequence with Four Different Chemical Modifications

[0416] The impact of chemical modifications to the sgRNA upon in vivo editing efficiency was further investigated by testing 4 different guide chemistries introduced into the same guide RNA sequence. Guide RNA 7 that targets the mouse HAO1 gene was synthesized with chemical modifications #1, #35, #42, or #45. The sequences of these guides are shown below in Table 13.

TABLE 13
Sequences of MG3-6/3-4 sgRNA guide 7 targeting mouse HAO1

| Guide name | Sequence | SEQ ID NO: |
|---|---|---|
| mH364-7-1 | mG*mA*mG*CUGGCCACUGUGCGAGGUAGUUGA | 1821 |
| | GAAUCGAAAGAUUCUUAAUAAGGCAUCCUUCCG | |
| | AUGCUGACUUCUCACCGUCCGUUUUCCAAUAGG | |
| | AGCGGGCGGUAUGU*mU*mU*mU | |
| mH364-7-35 | mG*mA*mG*mC*UGGCCACUGUGCGAGGUAGUU | 1822 |
| | GAGAAUCmG*mA*mA*mA*GAUUCUUAAUAAGG | |
| | CAUCmC*mU*mU*mC*mC*GAUGCUGACUUCUCA | |
| | CCGUCCGUUUUCCmA*mA*mU*mA*GGAGCGGGC | |
| | GGUA*mU*mG*mU*mU*mU*mU | |
| mH364-7-42 | mG*mA*mG*mC*fUfGfGfCfCfAfCfUfGfUfGfCfGfAf | 1823 |
| | GfGfUAGUUGAGAAUCG*A*A*A*GAUUCUUAAUA | |
| | AGGCAUCC*U*U*C*C*GAUGCUGACUUCUCACC | |
| | GUCCGUUUUCCA*A*U*A*GGAGCGGGCGGUA*m | |
| | U*mG*mU*mU*mU*mU | |
| mH364-7-45 | mG*mA*mG*mC*fUfGfGfCfCfAfCfUfGfUfGfCfGfAf | 1824 |
| | GfGfUAGUUGAGAAUCmG*mA*mA*mA*GAUUCU | |
| | UAAUAAGGCAUCmC*mU*mU*mC*mC*GAUGCUG | |
| | ACUUCUCACCGUCCGUUUUCCmA*mA*mU*mA*G | |
| | GAGCGGGCGGUA*mU*mG*mU*mU*mU*mU | |

m: 2′-O methyl modified base, *: phosphorothioate backbone

[0417] The mRNA encoding MG3-6/3-4 nuclease was generated by in vitro transcription of a linearized plasmid template using T7 RNA polymerase, nucleotides, and enzymes. The DNA sequence that was transcribed into RNA comprised the following elements in order from 5′ to 3′: the T7 RNA polymerase promoter, a 5′ untranslated region (5′ UTR), a nuclear localization signal, a short linker, the coding sequence for the MG3-6/3-4 nuclease, a short linker, a nuclear localization signal, and a 3′ untranslated region (SEQ ID NO: 603) and an approximately 100 nucleotide polyA tail (SEQ ID NO: 2865) (not included in SEQ ID No: 603).

[0418] The protein sequence encoded in the synthetic mRNA encoded in this MG3-6/3-4 cassette comprises the following elements from 5′ to 3′: the nuclear localization signal from SV40, a five amino acid linker (GGGGS (SEQ ID NO: 2864)), the protein coding sequence of the MG3-6/3-4 nuclease from which the initiating methionine codon was removed, a 3 amino acid linker (SGG), and the nuclear localization signal from nucleoplasmin. The DNA sequence of the protein coding region of this cassette was modified to reflect the codon usage in humans. An approximately 100 nucleotide polyA tail (SEQ ID NO: 2865) was encoded in the plasmid used for in vitro transcription, and the mRNA was co-transcriptionally capped. Uridine in the mRNA was replaced with N1-methyl pseudouridine. The lipid nanoparticle (LNP) formulation used to deliver the MG3-6/3-4 mRNA and the guide RNA is based on LNP formulations as described above. The four lipid components were dissolved in ethanol and mixed in an appropriate molar ratio to make the lipid working mix. The mRNA and the guide RNA were either mixed prior to formulation at a 1:1 mass ratio or formulated in separate LNP that were later co-injected into mice at a 1:1 mass ratio of the two RNA's. In either case, the RNA was diluted in 100 mM Sodium Acetate (pH 4.0) to make the RNA working stock. The lipid working stock and the RNA working stock were mixed in a microfluidics device at a flow rate ratio of 1:3, respectively, and a flow rate of 12 mLs/min. The LNP were dialyzed against phosphate buffered saline (PBS) for 2 to 16 hours and then concentrated until the reduced volume was achieved. The concentration of RNA in the LNP formulation was measured using the Ribogreen reagent. The diameter and polydispersity (PDI) of the LNP were determined by dynamic light scattering. Representative LNP had diameters ranged from 65 nm to 120 nm with PDI of 0.05 to 0.20. LNP were injected intravenously into 8- to 12-week-old C57B16 wild type mice via the tail vein (0.1 mL per mouse) at a total RNA dose of 1 mg RNA per kg body weight. Ten days post-dosing, 3 of the 5 mice in each group were sacrificed and the liver was collected and homogenized using a bead beater in a digestion buffer. Genomic DNA was purified from the resulting homogenate and quantified by measuring the absorbance at 260 nm. Genomic DNA purified from mice injected with buffer alone was used as a control. At 28 days post-dosing, the remaining 2 mice in each group were sacrificed and the liver was collected and homogenized using a bead beater in a digestion buffer. Genomic DNA was purified from the resulting homogenate and quantified by measuring the absorbance at 260 nm. Genomic DNA purified from mice injected with buffer alone was used as a control.

[0419] The liver genomic DNA was then PCR amplified using a first set of primers flanking the region targeted by the two guides. The PCR primers used are shown in Table 11. The 5′ end of these primers comprise conserved regions complementary to the PCR primers used in the second PCR, followed by 5 Ns in order to give sequence diversity and improve sequencing quality, and end with sequences complementary to the target region in the mouse genome. PCR was performed on 100 ng of genomic DNA and an annealing temperature of 60° C. for a total of 30 cycles. This was followed by a 2nd round of 10 cycles of PCR using primers designed to add unique dual barcodes for next generation sequencing. Each sample was sequenced to a depth of greater than 10,000 reads using 150 bp paired end reads. Reads were merged to generate a single 250 bp sequence from which Indel percentage and INDEL profile was calculated.

[0420] The editing results are summarized in FIG. 25 and tabulated in Table 14.

TABLE 14
Genome editing frequencies in the HAO1 gene in the whole
liver of individual mice treated with LNP encapsulating
MG3-6/3-4 mRNA and guide RNA 7 targeting the
HAO-1 gene with chemical modifications 42 (mH364-7-42),
45 (mH364-7-45), 1 (mH364-7-1), and 35 (mH364-7-35)

| | mH364 Guide 7 | | INDEL | Mean Group | |
|---|---|---|---|---|---|
| DAY | chemistry | Mouse | % | INDELS | Stdev |
| 10 | PBS control | 1 | 0.01 | 0.0 | 0.0 |
| 10 | PBS control | 2 | 0.01 | | |
| 10 | PBS control | 3 | 0.01 | | |
| 28 | PBS control | 4 | 0.02 | | |
| 28 | PBS control | 5 | 0.02 | | |
| 10 | 42 | 6 | 33.54 | 32.4 | 2.5 |
| 10 | 42 | 7 | 28.48 | | |
| 10 | 42 | 8 | 31.3 | | |
| 28 | 42 | 9 | 34.43 | | |
| 28 | 42 | 10 | 34.19 | | |
| 10 | 45 | 11 | 29.22 | 32.1 | 5.8 |
| 10 | 45 | 12 | 37.04 | | |
| 10 | 45 | 13 | 37.24 | | |
| 28 | 45 | 14 | 33.57 | | |
| 28 | 45 | 15 | 23.63 | | |
| 10 | 1 | 16 | 42.04 | 46.1 | 3.1 |
| 10 | 1 | 17 | 45.38 | | |
| 10 | 1 | 18 | 50.8 | | |
| 28 | 1 | 19 | 46.31 | | |
| 28 | 1 | 20 | 45.98 | | |
| 10 | 35 | 21 | 24.95 | 26.6 | 2.3 |
| 10 | 35 | 22 | 29.93 | | |
| 10 | 35 | 23 | 24.75 | | |
| 28 | 35 | 24 | 28.14 | | |
| 28 | 35 | 25 | 25.22 | | |

[0421] Control mice injected with PBS buffer did not contain measurable INDELS at the target site for guide 7. The mean INDEL frequency in mice that received LNP containing guides mH364-7-1, mH364-7-35, mH364-7-42, and mH364-7-45 was 46.1%, 26.6%, 32.4%, and 32.1%, respectively, demonstrating that guide RNA chemistry #1 was the most potent followed by #42 and #45, with chemistry #35 being the least potent. These data suggest that chemical modifications to the bases and backbone at the 5′ and 3′ ends of the guide RNA provided the highest in vivo potency amongst the chemistries tested. Additional modifications of internal bases did not improve in vivo potency. These findings are in contrast with published data for the spCas9 sgRNA where modifications of bases or the backbone at both the ends of the sgRNA and at internal sequences was required for optimal in vivo editing and modifications of just the 5′ and 3′ ends of the sgRNA enabled low levels of editing (20% INDELS) in the liver using delivery in a similar LNP.

[0422] Total RNA was purified from a separate lobe of the liver from the same mice described in Table 14 and used to measure level of HAO-1 mRNA by digital droplet PCR (dd-PCR). The PBS injected mice were used as controls and the levels of HAO-1 mRNA in the livers of edited mice were compared to these controls. The dd-PCR assay was designed and optimized using molecular biology techniques. ddPCR is a highly accurate method for determining the absolute copy number of a specific nucleic acid in a complex mixture. The total liver RNA was first converted to cDNA by reverse transcription then quantified in the dd-PCR assay using GAPDH as an internal control to normalize between samples. As shown in Table 15A, the level of HAO1 mRNA in the individual mice treated with LNP encapsulating MG3-6/3-4 mRNA and sgRNA targeting the mouse HAO1 gene was decreased, and the magnitude of decrease was correlated with the INDEL frequency.

TABLE 15A
HAO1 mRNA levels in the whole liver of individual mice treated
with LNP encapsulating MG3-6/3-4 mRNA and guide RNA 7 targeting
the HAO-1 gene with chemical modifications 42 (mH364-7-42), 45
(mH364-7-45), 1 (mH364-7-1), and 35 (mH364-7-35).

| | mH364 | | | Mean Group | |
|---|---|---|---|---|---|
| Harvest | Guide 7 | | % Decrease in | % decrease in | |
| Day | chemistry | Mouse | HAO mRNA | HAO mRNA | Stdev |
| 10 | 42 | 6 | 47.4 | 35.5 | 8.8 |
| 10 | 42 | 7 | 42.4 | | |
| 10 | 42 | 8 | 29.0 | | |
| 28 | 42 | 9 | 29.6 | | |
| 28 | 42 | 10 | 28.9 | | |
| 10 | 45 | 11 | 20.3 | 38.0 | 10.2 |
| 10 | 45 | 12 | 38.6 | | |
| 10 | 45 | 13 | 41.8 | | |
| 28 | 45 | 14 | 45.9 | | |
| 28 | 45 | 15 | 43.2 | | |
| 10 | 1 | 16 | 57.0 | 60.0 | 3.9 |
| 10 | 1 | 17 | 54.7 | | |
| 10 | 1 | 18 | 62.5 | | |
| 28 | 1 | 19 | 63.1 | | |
| 28 | 1 | 20 | 62.6 | | |
| 10 | 35 | 21 | 18.3 | 23.4 | 20.8 |
| 10 | 35 | 22 | −2.5 | | |
| 10 | 35 | 23 | 14.8 | | |
| 28 | 35 | 24 | 52.6 | | |
| 28 | 35 | 25 | 33.8 | | |

The same mice as in Table 10 were analyzed

[0423] The largest reduction in HAO1 mRNA was seen in the group of mice treated with sgRNA mH364-7-1, while the smallest reduction of HAO-1 mRNA was observed in mice treated with sgRNA mH364-7-35. A reduction in HAO1 mRNA can occur when frameshift mutations are introduced into the coding sequence of a gene via a mechanism called nonsense mediated decay. The observation of reduced HAO-1 mRNA in the liver of mice edited at the HAO-1 gene with MG3-6/3-4 is consistent with the presence of INDELS that result in a high rate of frame shifts as shown in Tables 15A-15B.

TABLE 15B
Analysis of the frequency of edits that result in frame shifts in the
liver of mice treated with LNP encapsulating MG3-6/3-4 mRNA
and sgRNA number 7 (G7) that targets the HAO-1 gene

| | Mean | Stdev of | Mean OOF % | Stdev OFF % |
|---|---|---|---|---|
| Treatment | INDELS | INDELS | total | total |
| PBS control | 0.0 | 0.0 | 0.0 | 0.0 |
| mH364-7-42 | 31.1 | 2.1 | 28.6 | 1.7 |
| mH364-7-45 | 34.5 | 3.7 | 31.2 | 3.2 |
| mH364-7-1 | 46.1 | 3.6 | 41.9 | 3.4 |
| mH364-7-35 | 26.5 | 2.4 | 24.3 | 2.5 |

The out of frame percentage (OOF %) was calculated by analyzing the NGS data

[0424] In Table 15B, the mean frequency of INDELS that result in a frame shift in the HAO1 coding sequence were determined from the NGS data. This analysis shows that the majority of the INDELS resulted in a frameshift for all four of the sgRNA tested.

[0425] The HAO1 gene encodes the protein glycolate oxidase (GO) that is an intracellular enzyme involved in glycolate metabolism. To determine if the observed gene editing in the HAO1 gene resulted in a reduction in the expression of the GO protein in the liver, total protein from a separate lobe of the liver was extracted from mice in the same study described in FIG. 25 and Tables 14 to 15B. The GO protein was detected using a Western blot assay with commercially available antibodies against the mouse GO protein. Equal amounts of protein were loaded on the Western blot. As shown in FIG. 26, the level of GO protein was reduced in the livers of mice treated with LNP encapsulating MG3-6/3-4 mRNA and sgRNA targeting HAO1. Guides mH364-7-42 (mice 7, 8), mH364-7-45 (mice 12, 13), and mH364-7-1 (mice 17, 18) resulted in clear reductions in GO protein. Guide mH364-7-35 (mice 22, 23) which had the lowest levels of INDELS among the 4 guides tested, did not appreciably reduce GO protein levels. These data demonstrate that the MG3-6/3-4 nuclease combined with an appropriately designed sgRNA can be used to create INDELS in a gene of interest in vivo in a living mammal and reduce (knockdown) the production of the protein encoded by that gene. Reducing the expression of specific genes can be therapeutically beneficial in specific diseases. In the case of the HAO1 gene that encodes the GO protein, reduction of the levels of GO protein in the liver is expected to be beneficial in patients with the hereditary disease primary hyperoxaluria type I. Thus the MG3-6/3-4 nuclease, together with an appropriate sgRNA containing appropriate chemical modifications targeting the HAO1 gene, is a potential approach for the treatment of primary hyperoxaluria type I.

### Example 20—MG3-6/3-4 Nuclease Guide Screen for Human HAO-1 Gene Using mRNA Transfection of Hep3B Cells

[0426] Guide RNA for the MG3-6/3-4 nuclease targeting exons 1 to 4 of the human HAO-1 gene (encoding glycolate oxidase) were identified in silico by searching for the PAM sequence 5′ NNAAA(A/T)N 3′. A total of 20 guides with the fewest predicted off-target sites in the human genome were chemically synthesized as single guide RNAs with end-modifications designated AltR1/AltR2 by inserting targeting sequences in a guide scaffold for MG3-6/3-4 (e.g., SEQ ID NO: 722 or SEQ ID NO:863).

### Hep3B Transfection Protocol

[0427] 300 ng mRNA and 120 ng single guide RNA were transfected into the human hepatoma cell line Hep3B as follows.

[0428] One day prior to transfection, Hep3B cells that had been cultured for less than 10 days in EMEM-10% FBS-2 mM glutamine-1% NEAA media, without Pen/Step, were seeded into a TC-treated 24 well plate. Cells were counted, and a volume containing 60,000 viable cells were added to each well. Additional pre-equilibrated media was added to each well to bring the total volume to 500 μL.

[0429] On the day of transfection, 300 ng of the MG3-6/3-4 mRNA and 120 ng of the sgRNA were transfected into the Hep3B cells.

[0430] Two days post transfection, the media was aspirated from each well of Hep3B cells and genomic DNA was purified by automated magnetic bead purification.

### PCR Amplification and Editing Analysis by Sanger Sequencing

[0431] HAO-1 gene sequences targeted by the single guides were amplified by PCR from purified genomic DNA using exon-specific primers (Table 16 below).

TABLE 16
Primers designed for the human HAO1 gene, used for PCR amplification of
the first four exons, and for Sanger sequencing.

| | | | | SEQ |
|---|---|---|---|---|
| Target | | | | ID |
| Exon | Use | Primer Name | Primer Sequence | NO: |
| Human | Fwd PCR | PCR_hHe1_F_ + 490 | TTTCATGGATGCCCCGTTCA | 2870 |
| HAO1 | Rev PCR | PCR_hHe1_R_ − 412 | ACGAAAAGCCAGCAGGAAGA | 2871 |
| Exon 1 | Sequencing | Seq_hHe1_R_ − 121 | AGCCCCAAGAACTTTTCCCT | 2872 |
| Human | Fwd PCR | PCR_hHe2_F_ + 391 | TGCATCAGTGGTTGTCAGGG | 2873 |
| HAO1 | Rev PCR | PCR_hHe2_R_ − 387 | CCTAGCTGTGACTTTGGGCA | 2874 |
| Exon 2 | Sequencing | Seq_hHe2_R_ − 152 | TGGAAAGAAGAGGAGCAGGAC | 2875 |
| Human | Fwd PCR | PCR_hHe3_F_ + 238 | AGGCTGGATGTTCAGGTTCTT | 2876 |
| HAO1 | Rev PCR | PCR_hHe3_R _− 212 | TCCCAAAGCCAAAGCCCTTA | 2877 |
| Exon 3 | Sequencing | Seq_hHe3_F_ + 186 | AGCAGAAATAACTCCAGTAGC | 2878 |
| | | | CA | |
| Human | Fwd PCR | PCR_hHe4_F_ + 324 | GCTGGCTGAAAATCGTGTCAA | 2879 |
| HAO1 | Rev PCR | PCR_hHe4_R_ − 348 | TCCTTGGGGCTTCTCTTTGG | 2880 |
| Exon 4 | Sequencing | Seq_hHe4_F_ + 174 | ACTGATTAAGACCACTAGAGTA | 2881 |
| | | | TCACA | |

[0432] PCR products were purified and concentrated and 40 ng of PCR product subjected to Sanger sequencing. The Sanger sequencing chromatograms were analyzed for insertions and deletions (INDELS) at the predicted target site for each guide. The presence of INDELS at the target site is the consequence of the generation of double strand breaks in the DNA which are then repaired by the error prone cellular repair machinery which introduces insertions and deletions. From this screen, guides hH364-9, 23, 32, and 35 were identified as the most active guides to be assayed for editing in PHH cells (FIG. 27 and Table 17 below).

TABLE 17
Editing activity of MG3-6/3-4 guides targeting the human HAO1 gene
delivered by mRNA transfection, based on MG3-6/3-4 guide

| | | | | Editing | Editing |
|---|---|---|---|---|---|
| | | | | Activity | Activity |
| | | SEQ | | in Hep3B | in PHH |
| Guide | | ID | Spacer Sequence | (Average | (Average |
| Name | PAM | NO: | (Targeting sequence) | % INDELs) | % INDELs) |
| hH364-1 | ACAAATT | 2882 | CATGTTGTTCATAATCATTGAT | 6.0 | |
| hH364-2 | CTAAATC | 2883 | ATCAATGATTATGAACAACATG | 0.0 | |
| hH364-4 | GCAAATG | 2884 | ATATGACTATTACAGGTCTGGG | 11.0 | |
| hH364-9 | AGAAAAT | 2885 | ATATTGCAGCATTTTCCAGGTA | 27.5 | 25.7 |
| hH364-12 | CTAAAAC | 2886 | ATTGGCATGCTGACCCTCTGTC | 0.0 | |
| hH364-14 | ACAAATA | 2887 | CAGGTAAGGTGTGTCCACTGTC | 0.0 | |
| hH364-16 | TAAAATA | 2888 | CTGGTTTCAAAATTTTTCATCC | 0.0 | |
| hH364-17 | CTAAAAT | 2889 | ACTGGTTTCAAAATTTTTCATC | 0.0 | |
| hH364- | TGAAAAA | 2890 | TTATGCATTTCTTATTTTAGGA | 0.0 | |
| 18 | | | | | |
| hH364- | GAAAAAT | 2891 | TATGCATTTCTTATTTTAGGAT | 2.5 | |
| 19 | | | | | |
| hH364- | AAAAATT | 2892 | ATGCATTTCTTATTTTAGGATG | 7.0 | |
| 20 | | | | | |
| hH364- | CAAAATT | 2893 | GAAAATGATAAAGTACTGGTTT | 0.0 | |
| 22 | | | | | |
| hH364- | TCAAAAT | 2894 | AGAAAATGATAAAGTACTGGTT | 36.5 | 26.3 |
| 23 | | | | | |
| hH364- | GGAAAAT | 2895 | GTACTTTATCATTTTCTCCTGA | 0.0 | |
| 27 | | | | | |
| hH364- | GAAAATT | 2896 | TACTTTATCATTTTCTCCTGAG | 0.0 | |
| 28 | | | | | |
| hH364- | CAAAATT | 2897 | GCAGCAAGTCCACTGTCGTCTC | 0.0 | |
| 29 | | | | | |
| hH364- | CCAAAAT | 2898 | TGCAGCAAGTCCACTGTCGTCT | 10.5 | |
| 30 | | | | | |
| hH364- | TCAAATG | 2899 | CCATCTATCAGCTGGGAAGATA | 60.0 | 25.0 |
| 32 | | | | | |
| hH364- | CAAAATG | 2900 | GTAGAGAAATAAACGAACCTCT | 0.0 | |
| 34 | | | | | |
| hH364- | TCAAAAT | 2901 | AGTAGAGAAATAAACGAACCTC | 20.0 | 26.3 |
| 35 | | | | | |

### Example 21—MG3-6/3-4 Nuclease Guide Screen for Human HAO-1 Gene Using mRNA Transfection of Primary Human Hepatocytes (PHH)

[0433] The four MG3-6/3-4 single guide RNAs with the highest editing activity in Hep3B cells (guides 9, 23, 32, and 35) were chemically synthesized with end-modifications (Table 18 below), purified by HPLC, and transfected into Primary Human Hepatocytes.

TABLE 18
Sequences of chemically modified MG3-6/3-4 guides assayed in Primary
Human Hepatocytes (m = 2′-O methyl modified base, * = phosphorothioate bond)

| | | SEQ ID |
|---|---|---|
| Guide | Sequence | NO: |
| hH364-9 | mA*mU*mA*UUGCAGCAUUUUCCAGGUAGUUGAGAAUCGA | 1862 |
| | AAGAUUCUUAAUAAGGCAUCCUUCCGAUGCUGACUUCUCA | |
| | CCGUCCGUUUUCCAAUAGGAGCGGGCGGUAUGU*mU*mU*m | |
| | U | |
| hH364-23 | mA*mG*mA*AAAUGAUAAAGUACUGGUUGUUGAGAAUCGA | 1863 |
| | AAGAUUCUUAAUAAGGCAUCCUUCCGAUGCUGACUUCUCA | |
| | CCGUCCGUUUUCCAAUAGGAGCGGGCGGUAUGU*mU*mU*m | |
| | U | |
| hH364-32 | mC*mC*mA*UCUAUCAGCUGGGAAGAUAGUUGAGAAUCGA | 1864 |
| | AAGAUUCUUAAUAAGGCAUCCUUCCGAUGCUGACUUCUCA | |
| | CCGUCCGUUUUCCAAUAGGAGCGGGCGGUAUGU*mU*mU*m | |
| | U | |
| hH364-35 | mA*mG*mU*AGAGAAAUAAACGAACCUCGUUGAGAAUCGA | 1865 |
| | AAGAUUCUUAAUAAGGCAUCCUUCCGAUGCUGACUUCUCA | |
| | CCGUCCGUUUUCCAAUAGGAGCGGGCGGUAUGU*mU*mU*m | |
| | U | |

Notations for chemical modifications: m = 2′O-Methyl ribonucleotide (e.g., mC = cytosine ribonucleotide with 2′-O Methyl in place of 2′ hydroxyl); f = 2′Fluorine ribonucleotide (e.g., fC = cytosine ribonucleotide with 2′ fluorine in place of 2′ hydroxyl); * = phosphorothioate bond. All other bases are native ribonucleotides.

### Primary Human Hepatocyte Transfection Protocol

[0434] 779.76 ng of MG3-6/3-4 mRNA and 470.24 ng of MG3-6/3-4 single guide RNA with appropriate targeting sequence (1:20 molar ratio of mRNA:guide RNA) were transfected into primary human hepatocyte (PHH) cells as follows.

[0435] One day prior to transfection, PHH cells were thawed and seeded in into collagen-treated 12 well plates at 1,000,000 viable cells per well.

[0436] On the day of transfection, 779.76 ng of the MG3-6/3-4 mRNA and 470.24 ng of the sgRNA were mixed, and transfected into the PHH cells. Following the transfection, media was replaced every day until harvest.

[0437] Three days post transfection, the genomic DNA of the transfected cells was purified by automated magnetic bead purification.

### PCR Amplification and Editing Analysis by Next-Generation Sequencing (NGS)

[0438] The region of the HAO-1 gene targeted by each specific sgRNA was PCR amplified with Q5 high fidelity DNA polymerase and gene specific primers (Table 19 below) with adapters complementary to the barcoded primers used for next generation sequencing (NGS) for a total of 29 cycles.

TABLE 19
Primers used to amplify each human HAO1 guide target site and for NGS

| Guide | Primer | Fwd with Miseq | SEQ | Rev with Miseq | SEQ ID |
|---|---|---|---|---|---|
| | Set Name | adapter | ID NO: | adapter | NO: |
| hH364-9 | hHAO1- | GCTCTTCCGATCTN | 2902 | GCTCTTCCGATCTN | 2906 |
| | NGS-P8 | NNNNCCCAAGAAC | | NNNNCCCCCGGCTA | |
| | | TTTTCCCTCTC | | ATTTGTATCA | |
| hH364-23 | hHAO1- | GCTCTTCCGATCTN | 2903 | GCTCTTCCGATCTN | 2907 |
| | NGS-P9 | NNNNGATGTCAGT | | NNNNGAGCAGTGA | |
| | | CTTCTCAGCCA | | ACAGCCAATTG | |
| hH364-32 | hHAO1- | GCTCTTCCGATCTN | 2904 | GCTCTTCCGATCTN | 2908 |
| | NGS-P4 | NNNNTATGAACGT | | NNNNTCTCCTGAGG | |
| | | ATCCACAAAGGAT | | AAAATTTTGGAG | |
| hH364-35 | hHAO1- | GCTCTTCCGATCTN | 2905 | GCTCTTCCGATCTN | 2909 |
| | NGS-P10 | NNNNGAGTTGGAA | | NNNNTGGAGACGA | |
| | | TGTCTCTCTCAA | | CAGTGGACTTG | |

[0439] The product of this first PCR reaction was PCR amplified using the barcoded primers for NGS using a total of 10 cycles. The resulting product was subjected to NGS the results were analyzed to generate the percentage of sequencing reads that contain insertions or deletions (indels) at the targeted site in the HAO-1 gene. The results indicate that all four guides edited the HAO-1 gene in PHH with similar activities (FIG. 28 and Table 17). PHH are a surrogate for editing hepatocytes in vivo. These data demonstrate that the MG3-6/3-4 nuclease and an appropriate single guide RNA has utility in generating insertions and deletions (indels) in the coding sequence of the HAO-1 gene. Indel profile obtained from the NGS sequencing was used to determine the percentage of indels that result in a frame shift (i.e., where the number of bases inserted or deleted are not 3 or a multiple of 3). For guides 9, 23, 32, and 35, the percentage of indels that were out of frame in edited PHH was 87.1%, 89.8%, 77.8%, and 82.0%, respectively.

### Example 22—Demonstration of Mammalian Cell Editing and Determination of PAM Sequences for Two MG3-6 Chimeric Enzymes

[0440] A lentiviral library was created in which randomized seven base pair regions were flanked by the sequences of target sites for active guide RNAs. A population of 293 cells was created where each cell was transduced by, on average, five lentiviral particles from the library. The appropriate guide RNAs and the matching mRNA encoding chimeric enzymes (where the PAM-interacting domains of MG3-7 and MG3-8 were used to replace the analogous domain in MG3-6) were electroporated into the 293 cell population (2,000,000 cells, 2500 ng mRNA and 1200 pmol guide RNA). Indel formation at the target sites was monitored and the consensus PAM sequence was compiled and is shown in FIG. 29.

### Example 23—In Vivo Editing Activity of MG3-6/3-4 Single Guide RNA with Different Chemical Modifications

[0441] To evaluate the ability of the MG3-6/3-4 Type II nuclease to edit the genome in vivo in a living animal, lipid nanoparticles were used to deliver an mRNA encoding the MG3-6/-34 nuclease and one of six guide RNAs with the same nucleotide sequence but different RNA chemistries. The sequences of these guides are shown in Table 20.

TABLE 20
Sequences and chemical modifications of guide RNAs tested in vivo in mice

| Guide | | SEQ ID |
|---|---|---|
| RNA | Sequence | NO: |
| mH364-7-1 | mG*mA*mG*CUGGCCACUGUGCGAGGUAGUUGAGAAUCG | 1812 |
| | AAAGAUUCUUAAUAAGGCAUCCUUCCGAUGCUGACUUC | |
| | UCACCGUCCGUUUUCCAAUAGGAGCGGGCGGUAUGU*mU | |
| | *mU*mU | |
| mH364-7-2 | mG*mA*mG*CUGGCCACUGUGCGAGGUAGUUGAGAAUCG | 1813 |
| | AAAGAUUCUUAAUAAGGCAUCCUUCCGAUGCUGACUUC | |
| | UCACCGUCCGUUUUCCAAUAGGAGCGGGCGGUA*mU*mG | |
| | *mU*mU*mU*mU | |
| mH364-7-9 | mG*mA*mG*CUGGCCACUGUGCGAGGUAGUUGAGAAUCm | 1814 |
| | GmAmAmAGAUUCUUAAUAAGGCAUCmCmUmUmCmCGAU | |
| | GCUGACUUCUCACCGUCCGUUUUCCmAmAmUmAGGAGC | |
| | GGGCGGUAUGU*mU*mU*mU | |
| mH364-7-10 | mG*mA*mG*CUGGCCACUGUGCGAGGUAGUUGAGAAUCG | 1815 |
| | *A*A*A*GAUUCUUAAUAAGGCAUCC*U*U*C*C*GAUGCU | |
| | GACUUCUCACCGUCCGUUUUCCA*A*U*A*GGAGCGGGCG | |
| | GUAUGU*mU*mU*mU | |
| mH364-7-46 | mG*mA*mG*CUGGCCACUGUGCGAGGUAGUUGAGAAUCm | 1819 |
| | GmAmAmAGAUUCUUAAUAAGGCAUCmCmUmUmCmCGAU | |
| | GCUGACUUCUCACCGUCCGUUUUCCmAmAmUmAGGAGC | |
| | GGGCGGUA*mU*mG*mU*mU*mU*mU | |
| mH364-7-47 | mG*mA*mG*CUGGCCACUGUGCGAGGUAGUUGAGAAUCG | 1820 |
| | *A*A*A*GAUUCUUAAUAAGGCAUCC*U*U*C*C*GAUGCU | |
| | GACUUCUCACCGUCCGUUUUCCA*A*U*A*GGAGCGGGCG | |
| | GUA*mU*mG*mU*mU*mU*mU | |

Notations for chemical modifications: m = 2′O-Methyl ribonucleotide (e.g., mC = cytosine ribonucleotide with 2′-O Methyl in place of 2′ hydroxyl); f = 2′Fluorine ribonucleotide (e.g., fC = cytosine ribonucleotide with 2′ fluorine in place of 2′ hydroxyl); * = phosphorothioate bond. All other bases are native ribonucleotides.

[0442] The spacer sequence in these guides targets the mouse HAO-1 gene. Guide mH364-7-1 has end modifications. Guide mH364-7-2 has additional methyl and phosphorothioate modifications at the 3′ end. Guide mH364-7-9 has end modifications plus methyl groups in all three loops. Guide mH364-7-10 has end modifications plus phosphorothioate linkages in all three loops. Guide mH364-7-46 has 5′ and 3′ end modifications the same as mH364-7-2 and methyl groups in all three loops. Guide mH364-7-47 has 5′ and 3′ end modifications the same as mH364-7-2, plus the phosphorothioate linkages in all three loops the same as in mH364-7-10. Because the chemical modifications in the sgRNA impact sgRNA stability, which is critical for in vivo potency, it was important to evaluate the impact of these changes on in vivo editing.

Preparation of MG3-613-4 mRNA

[0443] The mRNA encoding MG3-6/3-4 was generated by in vitro transcription of a linearized plasmid template using T7 RNA polymerase. The protein coding sequence of the MG3-6/3-4 cassette comprises the following elements from 5′ to 3′: the nuclear localization signal from SV40, a five amino acid linker (GGGGS (SEQ ID NO: 2864)), the protein coding sequence of the MG3-6/3-4 nuclease from which the initiating methionine codon was removed, a 3 amino acid linker (SGG), and the nuclear localization signal from nucleoplasmin. The DNA sequence of this cassette was codon optimized for human. An approximately 100 nucleotide polyA tail (SEQ ID NO: 2865) was encoded in the plasmid used for in vitro transcription and the mRNA was co-transcriptionally capped. Uridine in the mRNA was replaced with N1-methyl pseudouridine.

### Preparation of Lipid Nanoparticles

[0444] The lipid nanoparticle (LNP) formulation used to deliver the MG3-6/3-4 mRNA and the guide RNA is based on LNP formulations as described above. The four lipid components were dissolved in ethanol and mixed in an appropriate molar ratio to make the lipid working stock. The RNAs were diluted in 100 mM Sodium Acetate (pH 4.0) to make the RNA working stocks. The lipid working stock and the RNA working stocks were mixed in a microfluidics device at a flow rate ratio of 1:3, respectively, and a flow rate of 12 mL/min. The LNP were dialyzed against phosphate buffered saline (PBS) for 2 to 16 hours and then concentrated. The concentration of RNA in the LNP formulation was measured using the Ribogreen reagent. The diameter and polydispersity (PDI) of the LNP were determined by dynamic light scattering. Representative LNP had diameters ranging from 70 nm to 84 nm and PDI of 0.098 to 0.150.

### Mouse Dosing and Harvesting

[0445] LNP for mRNA and sgRNA were mixed at 1:1 mass ratio and injected intravenously into 7-week-old C57B16 wild type mice via the tail vein (0.1 mL per mouse) at a total RNA dose of 0.5 mg RNA per kg body weight. Seven days after dosing, the mice were sacrificed, and the left lateral, medial, and right lateral lobes of the liver were collected for preparation of DNA, RNA, and protein, respectively. Blood was collected by exsanguination via cardiac puncture and collected onto BD microtainer (heparin coated). Samples were kept on wet ice for no longer than 30 minutes prior to centrifugation. Samples were centrifuged at 2,000 G for 10 minutes and the plasma transferred to 1.5 mL Cryotubes and stored at −80° C.

### Genomic DNA Preparation and Editing Analysis by Next-Generation Sequencing (NGS)

[0446] The left lateral lobe of the liver (100 mg) was homogenized using a Bead Ruptor in the digestion buffer. Genomic DNA was purified from the resulting homogenate and quantified by measuring the absorbance at 260 nm. Genomic DNA purified from mice injected with PBS buffer alone was used as a control. The region of the HAO-1 gene targeted by each specific sgRNA was PCR amplified with Q5 high fidelity DNA polymerase and gene specific primers (Table 21) with adapters complementary to the barcoded primers used for next generation sequencing (NGS) for a total of 29 cycles. The product of this first PCR reaction was PCR amplified using the barcoded primers for NGS for a total of 10 cycles. The resulting product was subjected to NGS, and the results were analyzed to generate the percentage of sequencing reads that contain insertions or deletions (indels) at the targeted site in the HAO-1 gene.

TABLE 21
Primers used to amplify HAO1 guide target site and for NGS

| Guide | Primer Set Name | Fwd with Miseq adapter | Rev with Miseq adapter |
|---|---|---|---|
| mH364-7 | mHAO1-NGS-P4 | GCTCTTCCGATCTNNNNNG | GCTCTTCCGATCTNNN |
| (spacer 7) | | TAAAGAAAAACAAGGAAT | NNATCTGTCAACTTCT |
| | | GTAAT (SEQ ID NO: 2910) | GTTTTAGGAC (SEQ ID |
| | | | NO: 2911) |

### RNA Preparation and Analysis by RT-ddPCR

[0447] The medial lobe of the liver was stored in storage buffer to preserve the integrity of the RNA prior to homogenization. A maximum of 10 mg of tissue was transferred to a 2 mL tube containing 1.4 mm ceramic beads and homogenized using a Bead Ruptor following the soft tissue homogenization protocol: 5.00 m/s for 10-15 sec. Homogenized tissue was then processed and treated with an additional 45 minute on-column DNase I digestion treatment. The RNA products were quantified by measuring the absorbance at 260 nm. Isolated RNA samples then underwent an additional DNase treatment and reverse transcription. The cDNA product was then quantified by measuring the absorbance at 260 nm.

[0448] HAO1 mRNA levels were quantified using a custom ddPCR probe-based assay that was multiplexed with the housekeeping gene GAPDH. HAO1 was labeled with a HEX probe, while GAPDH was labeled with a FAM probe. Both probes were flanked by primers specific to the respective genes, creating amplicons of about 115 bp. The template material for the assay was 25 ng of cDNA product from the process above mixed with 900 nM of each primer and 250 nM of probe per gene assay along with 10 μL of ddPCR Supermix for Probes (No dUTP) raised to a final volume of 20 μL with nuclease-free water. The ddPCR was performed and analyzed. Results were divided into four sections: negative droplets (no fluorescence), single positive droplets (HEX or FAM positive fluorescence), and double positive droplets (both HEX and FAM fluorescence). Copies per p L of HAO1 and GAPDH were calculated for each sample. The ratio of HAO1 to GAPDH was compared for mice treated with mH29-29 against mice treated with buffer alone.

TABLE 22A
Primers and probes used in the amplification HAO1 and GAPDH ddPCR
assays

| Target | Probe | Probe | Fwd Primer | Rev primer |
|---|---|---|---|---|
| Gene | Fluorescence | Sequence | Sequence | sequence |
| HAO1 | HEX | AGTG+GGTG+C+C | GGGGAGAAAGG | CTCACCAATGT |
| | | A+GAAT+GTGAA | TGTTCAAGATGT | CTTGTCGATGA |
| | | (SEQ ID NO: 2912) | (SEQ ID NO: 2914) | (SEQ ID NO: |
| | | | | 2916) |
| GAPDH | FAM | +C+CATGCCATC | GCTTAG (SEQ ID | CTTCTGGG (SEQ |
| | | (SEQ ID NO: 2913) | NO: 2915) | ID NO: 2917) |
| | | CATGACCA+CAGT | GCACCACCAACT | CCATCCACAGT |

Notations for chemical modifications: + = Locked Nucleic Acid (LNA) base modification.

### Results and Conclusions

[0449] The NGS analysis of mouse liver genomic DNA showed that editing at the target site of the sgRNA in the HAO-1 gene of the groups dosed with LNP encapsulating MG3-6/3-4 mRNA and each of the six sgRNA ranged from 25% to 33% of total liver genomic DNA (FIG. 30). There were minor differences between most of the groups, indicating that guide RNAs with chemistries 1, 2, 9, 10, and 46 edited with similar efficiency, and that chemistry 47 may be somewhat less effective.

[0450] The GAPDH-normalized levels of HAO1 mRNA in the livers of mice from the groups treated with LNP encapsulating the mH364-7 sgRNA and MG3-6/3-4 mRNA ranged from 67% to 79% of the control group (FIG. 30). Editing of the HAO-1 gene that introduces INDELS into the coding sequence may result in a reduction in the amount of HAO-1 mRNA expressed as a result of nonsense mediated mRNA decay. The magnitude of reduction in HAO-1 mRNA correlated with the genome editing efficiency. Taken together, the genome editing and HAO-1 mRNA knockdown data demonstrate that the different sgRNA chemistries 1, 2, 9, 10, 46, and 47 had minor effects upon in vivo potency.

### Example 24—Analysis of Gene-Editing Outcomes at the DNA Level for VCP in K562 Cells

[0451] Nucleofection of either MG3-6/3-8 or MG3-6/3-4 mRNA and guide (500 ng mRNA, 150 pmol guide) was performed into K562 cells (200,000) using electroporation. Guides have a single mismatch targeting R155. Cells were harvested and genomic DNA prepared three days post-transfection. PCR primers appropriate for use in NGS-based DNA sequencing were generated, optimized, and used to amplify the individual target sequences for each guide RNA. The amplicons were sequenced and analyzed to determine gene editing (FIG. 31).

TABLE 22B
Guide Sequences for Editing VCP as Described in Example 24

| SEQ | | |
|---|---|---|
| ID | Guide | |
| NO: | RNA | Sequence |
| 723 | MG3- | mG*mC*mA*rCrGrCrArUrCrCrCrArCrCrArCrGrGrArCrArArGrUrUrGrArGrArArUr |
| | 6/3-8- | CrGrArArArGrArUrUrCrUrUrArArUrArArGrGrCrArUrCrCrUrUrCrCrGrArUrGrCrUr |
| | human | GrArCrUrUrCrUrCrArCrCrGrUrCrCrGrUrUrUrUrCrCrArArUrArGrGrArGrCrGrGrGr |
| | VCP | CrGrGrUrArUrGrU*mU*mU*mU |
| | A1 | |
| 724 | MG3- | mG*mC*mA*rCrGrCrArUrCrCrCrArCrCrArUrGrGrArCrArArGrUrUrGrArGrArArUr |
| | 6/3-8- | CrGrArArArGrArUrUrCrUrUrArArUrArArGrGrCrArUrCrCrUrUrCrCrGrArUrGrCrUr |
| | human | GrArCrUrUrCrUrCrArCrCrGrUrCrCrGrUrUrUrUrCrCrArArUrArGrGrArGrCrGrGrGr |
| | VCP | CrGrGrUrArUrGrU*mU*mU*mU |
| | B1 | |
| 725 | MG3- | mA*mC*mG*rCrArUrCrCrCrArCrCrArCrGrGrArCrArArGrArGrUrUrGrArGrArArUr |
| | 6/3-8- | CrGrArArArGrArUrUrCrUrUrArArUrArArGrGrCrArUrCrCrUrUrCrCrGrArUrGrCrUr |
| | human | GrArCrUrUrCrUrCrArCrCrGrUrCrCrGrUrUrUrUrCrCrArArUrArGrGrArGrCrGrGrGr |
| | VCP | CrGrGrUrArUrGrU*mU*mU*mU |
| | C1 | |
| 726 | MG3- | mA*mC*mG*rCrArUrCrCrCrArCrCrArUrGrGrArCrArArGrArGrUrUrGrArGrArArUr |
| | 6/3-8- | CrGrArArArGrArUrUrCrUrUrArArUrArArGrGrCrArUrCrCrUrUrCrCrGrArUrGrCrUr |
| | human | GrArCrUrUrCrUrCrArCrCrGrUrCrCrGrUrUrUrUrCrCrArArUrArGrGrArGrCrGrGrGr |
| | VCP | CrGrGrUrArUrGrU*mU*mU*mU |
| | D1 | |
| 727 | MG3- | mC*mG*mG*rArCrArArGrArArArArArUrGrUrCrUrCrCrUrGrGrUrUrGrArGrArArUr |
| | 6/3-8- | CrGrArArArGrArUrUrCrUrUrArArUrArArGrGrCrArUrCrCrUrUrCrCrGrArUrGrCrUr |
| | human | GrArCrUrUrCrUrCrArCrCrGrUrCrCrGrUrUrUrUrCrCrArArUrArGrGrArGrCrGrGrGr |
| | VCP | CrGrGrUrArUrGrU*mU*mU*mU |
| | E1 | |
| 728 | MG3- | mU*mG*mG*rArCrArArGrArArArArArUrGrUrCrUrCrCrUrGrGrUrUrGrArGrArArUr |
| | 6/3-8- | CrGrArArArGrArUrUrCrUrUrArArUrArArGrGrCrArUrCrCrUrUrCrCrGrArUrGrCrUr |
| | human | GrArCrUrUrCrUrCrArCrCrGrUrCrCrGrUrUrUrUrCrCrArArUrArGrGrArGrCrGrGrGr |
| | VCP F1 | CrGrGrUrArUrGrU*mU*mU*mU |
| 729 | MG3- | mG*mG*mA*rGrArCrArUrUrUrUrUrCrUrUrGrUrCrCrGrUrGrGrUrUrGrArGrArArUr |
| | 6/3-8- | CrGrArArArGrArUrUrCrUrUrArArUrArArGrGrCrArUrCrCrUrUrCrCrGrArUrGrCrUr |
| | human | GrArCrUrUrCrUrCrArCrCrGrUrCrCrGrUrUrUrUrCrCrArArUrArGrGrArGrCrGrGrGr |
| | VCP | CrGrGrUrArUrGrU*mU*mU*mU |
| | G1 | |
| 730 | MG3- | mG*mG*mA*rGrArCrArUrUrUrUrUrCrUrUrGrUrCrCrArUrGrGrUrUrGrArGrArArUr |
| | 6/3-8- | CrGrArArArGrArUrUrCrUrUrArArUrArArGrGrCrArUrCrCrUrUrCrCrGrArUrGrCrUr |
| | human | GrArCrUrUrCrUrCrArCrCrGrUrCrCrGrUrUrUrUrCrCrArArUrArGrGrArGrCrGrGrGr |
| | VCP | CrGrGrUrArUrGrU*mU*mU*mU |
| | H1 | |
| 731 | MG3- | mA*mG*mA*rCrArUrUrUrUrUrCrUrUrGrUrCrCrGrUrGrGrUrGrUrUrGrArGrArArUr |
| | 6/3-8- | CrGrArArArGrArUrUrCrUrUrArArUrArArGrGrCrArUrCrCrUrUrCrCrGrArUrGrCrUr |
| | human | GrArCrUrUrCrUrCrArCrCrGrUrCrCrGrUrUrUrUrCrCrArArUrArGrGrArGrCrGrGrGr |
| | VCP | CrGrGrUrArUrGrU*mU*mU*mU |
| | A2 | |
| 732 | MG3- | mA*mG*mA*rCrArUrUrUrUrUrCrUrUrGrUrCrCrArUrGrGrUrGrUrUrGrArGrArArUr |
| | 6/3-8- | CrGrArArArGrArUrUrCrUrUrArArUrArArGrGrCrArUrCrCrUrUrCrCrGrArUrGrCrUr |
| | human | GrArCrUrUrCrUrCrArCrCrGrUrCrCrGrUrUrUrUrCrCrArArUrArGrGrArGrCrGrGrGr |
| | VCP | CrGrGrUrArUrGrU*mU*mU*mU |
| | B2 | |
| 733 | MG3- | mU*mG*mU*rCrCrGrUrGrGrUrGrGrGrArUrGrCrGrUrGrCrUrGrUrUrGrArGrArArUr |
| | 6/3-8- | CrGrArArArGrArUrUrCrUrUrArArUrArArGrGrCrArUrCrCrUrUrCrCrGrArUrGrCrUr |
| | human | GrArCrUrUrCrUrCrArCrCrGrUrCrCrGrUrUrUrUrCrCrArArUrArGrGrArGrCrGrGrGr |
| | VCP | CrGrGrUrArUrGrU*mU*mU*mU |
| | C2 | |
| 734 | MG3- | mU*mG*mU*rCrCrArUrGrGrUrGrGrGrArUrGrCrGrUrGrCrUrGrUrUrGrArGrArArUr |
| | 6/3-8- | CrGrArArArGrArUrUrCrUrUrArArUrArArGrGrCrArUrCrCrUrUrCrCrGrArUrGrCrUr |
| | human | GrArCrUrUrCrUrCrArCrCrGrUrCrCrGrUrUrUrUrCrCrArArUrArGrGrArGrCrGrGrGr |
| | VCP | CrGrGrUrArUrGrU*mU*mU*mU |
| | D2 | |
| 735 | MG3- | mG*mU*mC*rCrGrUrGrGrUrGrGrGrArUrGrCrGrUrGrCrUrGrGrUrUrGrArGrArArUr |
| | 6/3-8- | CrGrArArArGrArUrUrCrUrUrArArUrArArGrGrCrArUrCrCrUrUrCrCrGrArUrGrCrUr |
| | human | GrArCrUrUrCrUrCrArCrCrGrUrCrCrGrUrUrUrUrCrCrArArUrArGrGrArGrCrGrGrGr |
| | VCP | CrGrGrUrArUrGrU*mU*mU*mU |
| | E2 | |
| 736 | MG3- | mG*mU*mC*rCrArUrGrGrUrGrGrGrArUrGrCrGrUrGrCrUrGrGrUrUrGrArGrArArUr |
| | 6/3-8- | CrGrArArArGrArUrUrCrUrUrArArUrArArGrGrCrArUrCrCrUrUrCrCrGrArUrGrCrUr |
| | human | GrArCrUrUrCrUrCrArCrCrGrUrCrCrGrUrUrUrUrCrCrArArUrArGrGrArGrCrGrGrGr |
| | VCP F2 | CrGrGrUrArUrGrU*mU*mU*mU |
| 737 | MG3- | mU*mC*mC*rGrUrGrGrUrGrGrGrArUrGrCrGrUrGrCrUrGrUrGrUrUrGrArGrArArUr |
| | 6/3-8- | CrGrArArArGrArUrUrCrUrUrArArUrArArGrGrCrArUrCrCrUrUrCrCrGrArUrGrCrUr |
| | human | GrArCrUrUrCrUrCrArCrCrGrUrCrCrGrUrUrUrUrCrCrArArUrArGrGrArGrCrGrGrGr |
| | VCP | CrGrGrUrArUrGrU*mU*mU*mU |
| | G2 | |
| 738 | MG3- | mU*mC*mC*rArUrGrGrUrGrGrGrArUrGrCrGrUrGrCrUrGrUrGrUrUrGrArGrArArUr |
| | 6/3-8- | CrGrArArArGrArUrUrCrUrUrArArUrArArGrGrCrArUrCrCrUrUrCrCrGrArUrGrCrUr |
| | human | GrArCrUrUrCrUrCrArCrCrGrUrCrCrGrUrUrUrUrCrCrArArUrArGrGrArGrCrGrGrGr |
| | VCP | CrGrGrUrArUrGrU*mU*mU*mU |
| | H2 | |
| 739 | MG3 | GCACGCATCCCACCACGGACAA |
| | 6/3-8- | |
| | human | |
| | VCP | |
| | A1 | |
| 740 | MG3- | GCACGCATCCCACCATGGACAA |
| | 6/3-8- | |
| | human | |
| | VCP | |
| | B1 | |
| 741 | MG3- | ACGCATCCCACCACGGACAAGA |
| | 6/3-8- | |
| | human | |
| | VCP | |
| | C1 | |
| 742 | MG3- | ACGCATCCCACCATGGACAAGA |
| | 6/3-8- | |
| | human | |
| | VCP | |
| | D1 | |
| 743 | MG3- | CGGACAAGAAAAATGTCTCCTG |
| | 6/3-8- | |
| | human | |
| | VCP | |
| | E1 | |
| 744 | MG3- | TGGACAAGAAAAATGTCTCCTG |
| | 6/3-8- | |
| | human | |
| | VCP F1 | |
| 745 | MG3- | GGAGACATTTTTCTTGTCCGTG |
| | 6/3-8- | |
| | human | |
| | VCP | |
| | G1 | |
| 746 | MG3- | GGAGACATTTTTCTTGTCCATG |
| | 6/3-8- | |
| | human | |
| | VCP | |
| | H1 | |
| 747 | MG3- | AGACATTTTTCTTGTCCGTGGT |
| | 6/3-8- | |
| | human | |
| | VCP | |
| | A2 | |
| 748 | MG3- | AGACATTTTTCTTGTCCATGGT |
| | 6/3-8- | |
| | human | |
| | VCP | |
| | B2 | |
| 749 | MG3- | TGTCCGTGGTGGGATGCGTGCT |
| | 6/3-8- | |
| | human | |
| | VCP | |
| | C2 | |
| 750 | MG3- | TGTCCATGGTGGGATGCGTGCT |
| | 6/3-8- | |
| | human | |
| | VCP | |
| | D2 | |
| 751 | MG3- | GTCCGTGGTGGGATGCGTGCTG |
| | 6/3-8- | |
| | human | |
| | VCP | |
| | E2 | |
| 752 | MG3- | GTCCATGGTGGGATGCGTGCTG |
| | 6/3-8- | |
| | human | |
| | VCP F2 | |
| 753 | MG3- | TCCGTGGTGGGATGCGTGCTGT |
| | 6/3-8- | |
| | human | |
| | VCP | |
| | G2 | |
| 754 | MG3- | TCCATGGTGGGATGCGTGCTGT |
| | 6/3-8- | |
| | human | |
| | VCP | |
| | H2 | |
| 755 | MG3 | mC*mA*mG*rCrArCrGrCrArUrCrCrCrArCrCrArCrGrGrArCrGrUrUrGrArGrArArUrC |
| | 6/3-4- | rGrArArArGrArUrUrCrUrUrArArUrArArGrGrCrArUrCrCrUrUrCrCrGrArUrGrCrUrGr |
| | human | ArCrUrUrCrUrCrArCrCrGrUrCrCrGrUrUrUrUrCrCrArArUrArGrGrArGrCrGrGrGrCr |
| | VCP | GrGrUrArUrGrU*mU*mU*mU |
| | A3 | |
| 756 | MG3- | mC*mA*mG*rCrArCrGrCrArUrCrCrCrArCrCrArUrGrGrArCrGrUrUrGrArGrArArUr |
| | 6/3-4- | CrGrArArArGrArUrUrCrUrUrArArUrArArGrGrCrArUrCrCrUrUrCrCrGrArUrGrCrUr |
| | human | GrArCrUrUrCrUrCrArCrCrGrUrCrCrGrUrUrUrUrCrCrArArUrArGrGrArGrCrGrGrGr |
| | VCP | CrGrGrUrArUrGrU*mU*mU*mU |
| | B3 | |
| 757 | MG3- | mA*mG*mC*rArCrGrCrArUrCrCrCrArCrCrArCrGrGrArCrArGrUrUrGrArGrArArUr |
| | 6/3-4 | CrGrArArArGrArUrUrCrUrUrArArUrArArGrGrCrArUrCrCrUrUrCrCrGrArUrGrCrUr |
| | human | GrArCrUrUrCrUrCrArCrCrGrUrCrCrGrUrUrUrUrCrCrArArUrArGrGrArGrCrGrGrGr |
| | VCP | CrGrGrUrArUrGrU*mU*mU*mU |
| | C3 | |
| 758 | MG3- | mA*mG*mC*rArCrGrCrArUrCrCrCrArCrCrArUrGrGrArCrArGrUrUrGrArGrArArUr |
| | 6/3-4- | CrGrArArArGrArUrUrCrUrUrArArUrArArGrGrCrArUrCrCrUrUrCrCrGrArUrGrCrUr |
| | human | GrArCrUrUrCrUrCrArCrCrGrUrCrCrGrUrUrUrUrCrCrArArUrArGrGrArGrCrGrGrGr |
| | VCP | CrGrGrUrArUrGrU*mU*mU*mU |
| | D3 | |
| 759 | MG3- | mG*mC*mA*rCrGrCrArUrCrCrCrArCrCrArCrGrGrArCrArArGrUrUrGrArGrArArUr |
| | 6/3-4- | CrGrArArArGrArUrUrCrUrUrArArUrArArGrGrCrArUrCrCrUrUrCrCrGrArUrGrCrUr |
| | human | GrArCrUrUrCrUrCrArCrCrGrUrCrCrGrUrUrUrUrCrCrArArUrArGrGrArGrCrGrGrGr |
| | VCP | CrGrGrUrArUrGrU*mU*mU*mU |
| | E3 | |
| 760 | MG3- | mG*mC*mA*rCrGrCrArUrCrCrCrArCrCrArUrGrGrArCrArArGrUrUrGrArGrArArUr |
| | 6/3-4- | CrGrArArArGrArUrUrCrUrUrArArUrArArGrGrCrArUrCrCrUrUrCrCrGrArUrGrCrUr |
| | human | GrArCrUrUrCrUrCrArCrCrGrUrCrCrGrUrUrUrUrCrCrArArUrArGrGrArGrCrGrGrGr |
| | VCP F3 | CrGrGrUrArUrGrU*mU*mU*mU |
| 761 | MG3- | mC*mA*mC*rGrCrArUrCrCrCrArCrCrArCrGrGrArCrArArGrGrUrUrGrArGrArArUr |
| | 6/3-4- | CrGrArArArGrArUrUrCrUrUrArArUrArArGrGrCrArUrCrCrUrUrCrCrGrArUrGrCrUr |
| | human | GrArCrUrUrCrUrCrArCrCrGrUrCrCrGrUrUrUrUrCrCrArArUrArGrGrArGrCrGrGrGr |
| | VCP | CrGrGrUrArUrGrU*mU*mU*mU |
| | G3 | |
| 762 | MG3- | mC*mA*mC*rGrCrArUrCrCrCrArCrCrArUrGrGrArCrArArGrGrUrUrGrArGrArArUr |
| | 6/3-4- | CrGrArArArGrArUrUrCrUrUrArArUrArArGrGrCrArUrCrCrUrUrCrCrGrArUrGrCrUr |
| | human | GrArCrUrUrCrUrCrArCrCrGrUrCrCrGrUrUrUrUrCrCrArArUrArGrGrArGrCrGrGrGr |
| | VCP | CrGrGrUrArUrGrU*mU*mU*mU |
| | H3 | |
| 763 | MG3- | CAGCACGCATCCCACCACGGAC |
| | 6/3-4- | |
| | human | |
| | VCP | |
| | A3 | |
| 764 | MG3- | CAGCACGCATCCCACCATGGAC |
| | 6/3-4- | |
| | human | |
| | VCP | |
| | B3 | |
| 765 | MG3- | AGCACGCATCCCACCACGGACA |
| | 6/3-4- | |
| | human | |
| | VCP | |
| | C3 | |
| 766 | MG3- | AGCACGCATCCCACCATGGACA |
| | 6/3-4- | |
| | human | |
| | VCP | |
| | D3 | |
| 767 | MG3- | GCACGCATCCCACCACGGACAA |
| | 6/3-4- | |
| | human | |
| | VCP | |
| | E3 | |
| 768 | MG3- | GCACGCATCCCACCATGGACAA |
| | 6/3-4- | |
| | human | |
| | VCP F3 | |
| 769 | MG3- | CACGCATCCCACCACGGACAAG |
| | 6/3-4- | |
| | human | |
| | VCP | |
| | G3 | |
| 770 | MG3- | CACGCATCCCACCATGGACAAG |
| | 6/3-4- | |
| | human | |
| | VCP | |
| | H3 | |

Notations for chemical modifications: m = 2′O-Methyl ribonucleotide (e.g., mC = cytosine ribonucleotide with 2′-O Methyl in place of 2′ hydroxyl); f = 2′Fluorine ribonucleotide (e.g., fC = cytosine ribonucleotide with 2′ fluorine in place of 2′ hydroxyl); * = phosphorothioate bond. All other bases are native ribonucleotides.

### Example 25—In Vitro Transcription of mRNA

[0452] Sequences for chimera mRNA were codon optimized for human expression, then synthesized and cloned into a high copy ampicillin plasmid. Synthesized constructs encoding T7 promoter, UTRs, chimera ORF, and NLS sequences were digested from the backbone with HindII and BamHI, and ligated into a pUC19 plasmid backbone (Seq ID NO: 1788). The complete chimera mRNA plasmid comprises an ORI, ampicillin resistance cassette, the synthesized construct, and an encoded polyA tail. Chimera mRNA was synthesized via in vitro transcription (IVT) using the linearized chimera mRNA plasmid. This plasmid was linearized and purified with Phenol:Chloroform:Isoamyl Alcohol (25:24:1, v/v), precipitated in ethanol, and resuspended in nuclease-free water at an adjusted concentration of 500 ng/μL. The IVT reaction to generate chimera mRNA was performed at 50° C. for 1 hr. After 1 hr, the IVT reaction was stopped and plasmid DNA was digested with the addition of 250 U/mL DNaseI and incubated for 10 min at 37° C. Chimera mRNA was purified and transcript concentration was determined by UV and further analyzed by capillary gel electrophoresis.

### Example 26—Protein Recombination of Type II Endonucleases

[0453] MG3-6 is a highly active and specific double-stranded DNA (dsDNA) cleaving enzyme. Engineering of the enzyme to accommodate a more generic or different preference for PAM (protospacer adjacent motif, a short stretch of DNA sequence required for DNA recognition) would further increase the utility of the enzyme to target additional sequences in DNA. A set of MG3-6 chimeras were generated by swapping domains including partial RuvC (e.g., RuvC-III, denoted as R), WED (denoted as W), and PAM-interacting domain (denoted as PI) domains. For simplicity, these chimeric systems were individually designated MG3-6 followed by _MG number and RWP. To expand the compatibility of PAM in the genome, the WED and PI domain (PAM interaction domain) of MG3-6 were swapped with domains from MG3 and MG150 (MG3-like family) proteins. The breakpoint was chosen in the unstructured loop between RuvC-III and WED domains (see FIG. 41 panels (a) and (b)). To determine the specific amino acid position for structural recombination, homologous sequences of MG3 and MG150 were analyzed, and WED and PI domains were swapped right after histidine, corresponding to residue 838 of MG3-6 (see FIG. 41 panel (c)) (chimeric sequences provided as SEQ ID NOs: 774-807).

[0454] Activities of chimeric proteins were characterized by an automated in vitro PAM enrichment, where active enzymes digested dsDNA and subsequent processing yielded DNA fragments as products, according to the following procedure. Chimera sequences were codon-optimized for E. coli expression, synthesized, and cloned into pAL3 vector (SEQ ID NO: 920). The PAM sequence was determined via expression in either an E. coli lysate-based expression system or reconstituted via in vitro translation. The E. coli codon-optimized protein sequence was transcribed and translated from a PCR fragment under control of a T7 promoter. This mixture was diluted into a reaction buffer (10 mM Tris pH 7.5, 100 mM NaCl, 10 mM MgCl₂) with protein-specific sgRNA and a PAM plasmid library (PAM library U67/U40). Specifically, MG3-6 sgRNA was used for MG3-6 chimera recombining with MG3 and MG150 members (SEQ ID NO: 863). The guide was synthesized. The library of plasmids contained a spacer sequence matching that in the single guide followed by 8N mixed bases, a subset of which would have the preferred PAM (SEQ ID NO: 921). After 1-3 h, the reaction was stopped, and the DNA was recovered. The cleaved DNA products from Type II chimera's digestion were subjected to a blunt-end ligation reaction which added adapter sequences to cleaved library plasmids while leaving intact circular plasmids unchanged. A PCR was performed with primers (LA065 and LA125) (SEQ ID NOs: 1786-1787) specific to the library and the adapter sequence, and the product was resolved on a gel to identify active protein complexes. The resulting PCR products were further amplified by PCR using high throughput sequencing primers. Samples subjected to NGS analysis were quantified and pooled together. The NGS library was purified and quantified. Sequencing this library, which was a subset of the starting 8N library, reveals the sequences which contain the correct PAM.

[0455] The agarose gel result suggested that 20 out 33 recombined MG3-6 with MG3 and MG150 were active, a hit of 60% with this breakpoint (see FIG. 42A). A lower success rate of MG3-6 recombining with MG150 may be due to structural disruption. While bands for MG3-6_3-2WP, MG3-6_3-42WP, MG3-6_3-91WP, MG3-6_3-94WP, MG3-6_3-101WP were not observed on the agarose gel, seqlogos were acquired with sensitive NGS analysis. It was observed that closely related PIDs may share similar PAMs. For example, MG3-6_150-1WP, MG3-6_150-7WP, and MG3-6_150-8WP exhibited sequence preferences of CC on the fourth and fifth positions in an 8N library. With this protein engineering approach, the MG3-6 PAM (nnRGRYYn) was expanded to a variety of PAM sequences (see FIG. 42B).

[0456] A domain swap of partial RuvC-III, WED, and PI of MG3-6 with MG3-8 altered its PAM from nnRGRYYn to nnRRnnYn, resulting in MG3-6_3-8 that was able to increase targeting density in the genome. To alter the PAM of MG3-6_3-8RWP without compromising its activity, N-terminal MG3-6 and partial RuvC-III plus WED domains from MG3-8 were maintained as the nuclease chassis for recombination. PID domains used for recombination were sourced from MG3, MG15, and MG150 members (see FIG. 43 panels (a) and (b)). The breakpoint of MG3-6_3-8 recombining MG3 and MG150 members was selected in the floppy loop among WED and PID (see FIG. 43 panel (c)) (SEQ ID NOs: 808-841). Similarly, the same region was chosen for recombination of MG3-6_3-8 recombining MG15 members (SEQ ID NOs: 842-862). Out of 33 chimeras tested, 22 showed distinct bands on the agarose gel, suggesting cleavage activities of these nucleases. Previously, MG3-6_3-2WP, MG3-6_42WP, and MG3-6_3-91WP did not display high activity as suggested agarose gel results. However, given a new breakpoint, it was observed that they may become more active using the chassis of MG3-6_3-8 (FIG. 44A). Subsequent NGS analysis revealed a panel of diversified PAMs for broader genome targeting (FIG. 44B).

### Example 27—Screening of Chimeras in Mammalian Cells

[0457] Nucleofection of mRNA and guide (500 ng mRNA, 150 pmol guide) was performed in K562 cells (200,000 cells per guide), Hep3B cells (100,000 cells per guide), or Hepa1-6 cells (100,000 cells per guide) using electroporation. Guides used for screening were chemically synthesized. Cells were harvested and genomic DNA prepared three days post-transfection. PCR primers appropriate for use in NGS-based DNA sequencing were generated, optimized, and used to amplify the individual target sequences for each guide RNA. The amplicons were sequenced and analyzed to determine gene editing.

[0458] Gene editing activities of MG3-6_3-3RWP, MG3-6_3-7RWP, and MG3-6_3-8RWP were examined in K562 cells, where RWP stands for partial RuvC-III, WED, and PID (SEQ ID NOs: 771-773). PAMs of MG3-6_3-3RWP, MG3-6_3-7RWP, and MG3-6_3-8RWP are nnnCCCYR, nnRnYAYn, and nnRRnnYn, respectively. Screening of 25 guides for MG3-6_3-3RWP revealed that guide A1 on the TRAC locus and guides A2, E2, A3, and F3 on the AAVS1 locus showed more than 50% indels (FIG. 32) (SEQ ID NOs: 922-924 and 928-949). The same two loci were also used to screen 58 guides of MG3-6_3-7RWP, and the results showed that guide C3 of TRAC and guide B8 of AAVS1 exhibited more than 50% indels (FIG. 33) (SEQ ID NOs: 972-991 and 1012-1049). 237 guides were screened for MG3-6_3-8RWP on the TRAC locus, and the result demonstrated that 45 guides showed more than 50% editing. Noticeably, multiple sites showed more than 90% editing in the course of guide screens (FIGS. 34 and 35) (SEQ ID NOs: 1088-1183 and 1280-1320).

[0459] In addition to the TRAC and AAVS1 sites, guides were also designed for MG3-6_3-4RWP to target PCSK9 and ANGPTL3 in Hep3B cells, for MG3-6_3-8RWP to target APOA6 in Hep3B cells, and for MG3-6_3-7RWP to target GPR146 and APOA1 in Hepa1-6 cells. Screening results of MG3-6_3-4RWP showed that four guides on PCSK9 achieved indel rates over 50% and three guides on ANGPTL3 achieved indel rates close to 100% (FIGS. 36 and 37) (SEQ ID NOs: 1362-1376 and 1392-1489). Among the sites targeted for MG3-6_3-8RWP on APOA1, four guides showed more than 50% indel formation (FIG. 38) (SEQ ID NOs: 1764-1774). Screening of MG3-6_3-7RWP on GPR146 and APOA1 showed one and seven guides passing more than 50% indel rates (FIGS. 39 and 40) (SEQ ID NOs: 1588-1656 and 1726-1744).

### Example 28—In Vivo Editing Activity of MG3-6/3-4 Single Guide RNAs with Different Chemical Modifications

[0460] To evaluate the ability of the MG3-6/3-4 Type II nuclease to edit the genome in vivo in a living animal, lipid nanoparticles were used to deliver an mRNA encoding the MG3-6/-3-4 nuclease and one of five guide RNAs with the same nucleotide sequence but different RNA chemistries. The sequences of these guides are shown in Table 23.

TABLE 23
Sequences and chemical modifications of guide RNAs tested in vivo in mice

| | SEQ ID | |
|---|---|---|
| Guide RNA | NO: | Sequence (Spacer-Backbone) |
| mH364-7-46 | 1819 | mG*mA*mG*CUGGCCACUGUGCGAGGUA- |
| | | GUUGAGAAUCmGmAmAmAGAUUCUUAAUAAGGCAUCm |
| | | CmUmUmCmCGAUGCUGACUUCUCACCGUCCGUUUUCCm |
| | | AmAmUmAGGAGCGGGCGGUA*mU*mG*mU*mU*mU*mU |
| mH364-7-48 | 2960 | mG*mA*mG*fCfUfGfGfCfCfAfCfUfGfUfGfCfGAGGUA- |
| | | GUUGAGAAUCGAAAGAUUCUUAAUAAGGCAUCCUUCCG |
| | | AUGCUGACUUCUCACCGUCCGUUUUCCAAUAGGAGCGG |
| | | GCGGUA*mU*mG*mU*mU*mU*mU |
| mH364-7-50 | 2961 | mG*mA*mG*fCfUfGfGfCfCfAfCfUfGfUfGfCfGAGGUA- |
| | | GUUGAGAAUCmGmAmAmAGAUUCUUAAUAAGGCAUCm |
| | | CmUmUmCmCGAUGCUGACUUCUCACCGUCCGUUUUCCm |
| | | AmAmUmAGGAGCGGGCGGUA*mU*mG*mU*mU*mU*mU |
| mH364-7-52 | 2962 | mG*mA*mG*CfUGfGCfCAfCUfGUfGCGAGGUA- |
| | | GUUGAGAAUCmGmAmAmAGAUUCUUAAUAAGGCAUCm |
| | | CmUmUmCmCGAUGCUGACUUCUCACCGUCCGUUUUCCm |
| | | AmAmUmAGGAGCGGGCGGUA*mU*mG*mU*mU*mU*mU |
| mH364-7-53 | 2963 | mG*mA*mG*fCUfGGfCCfACfUGfUGfCGAGGUA- |
| | | GUUGAGAAUCmGmAmAmAGAUUCUUAAUAAGGCAUCm |
| | | CmUmUmCmCGAUGCUGACUUCUCACCGUCCGUUUUCCm |
| | | AmAmUmAGGAGCGGGCGGUA*mU*mG*mU*mU*mU*mU |

Notations for chemical modifications: m = 2′O-Methyl ribonucleotide (e.g., mC = cytosine ribonucleotide with 2′-O Methyl in place of 2′ hydroxyl); f = 2′Fluorine ribonucleotide (e.g., fC = cytosine ribonucleotide with 2′ fluorine in place of 2′ hydroxyl); * = phosphorothioate bond. All other bases are native ribonucleotides.

[0461] The spacer sequence in these guides targets the mouse HAO-1 gene. All the guide RNAs have the same end modifications consisting of three 2′ methyl groups with phosphorothioate linkages at the 5′ end and six 2′ methyl groups with phosphorothioate linkages at the 3′ end. Guide mH364-7-46, which had the highest editing activity in a previous mouse study, has additional 2′ methyl modifications in all three loops of the guide backbone sequence. Guide mH364-7-48 has 2′ fluorine modifications in the spacer sequence but no methyl modifications in the backbone loops. Guide mH364-7-50 combines the spacer 2′ fluorine and backbone loop 2′ methyl modifications of chemistries 46 and 48. Guide mH364-7-52 has fewer 2′ fluorines in the spacer than chemistry 50 but has the same backbone methyl modifications as chemistry 50. Guide mH364-7-53 has 2′ fluorines on different residues of the spacer than chemistry 52 and the same backbone methyl modifications as chemistries 50 and 52. Because the chemical modifications in the sgRNA impact sgRNA stability which is critical for in vivo potency it was important to evaluate the impact of these different modifications on in vivo editing.

Preparation of MG3-613-4 mRNA

[0462] The mRNA encoding MG3-6/3-4 was generated by in vitro transcription of a linearized plasmid template using T7 RNA polymerase. The protein coding sequence of the MG3-6/3-4 cassette comprises the following elements from 5′ to 3′: the nuclear localization signal from SV40, a five amino acid linker (GGGS (SEQ ID NO: 2918)), the protein coding sequence of the MG3-6/3-4 nuclease from which the initiating methionine codon was removed, a 3 amino acid linker (SGG), and the nuclear localization signal from nucleoplasmin. The DNA sequence of this cassette was codon optimized for human expression. An approximately 100 nucleotide polyA tail (SEQ ID NO: 2865) was encoded in the plasmid used for in vitro transcription and the mRNA was co-transcriptionally capped. Uridine in the mRNA was replaced with N1-methyl pseudouridine.

### Preparation of Lipid Nanoparticles

[0463] The lipid nanoparticle (LNP) formulation used to deliver the MG3-6/3-4 mRNA and the guide RNA is based on LNP formulations as described above. The four lipid components were dissolved in ethanol and mixed in an appropriate molar ratio to make the lipid working mix. The RNAs were diluted in 100 mM Sodium Acetate (pH 4.0) to make the RNA working stocks. The lipid working stock and the RNA working stocks were mixed in a microfluidics device at a flow rate ratio of 1:3, respectively, and a flow rate of 12 mL/min. The LNP were dialyzed against phosphate buffered saline (PBS) for 2 to 16 hours and then concentrated. The concentration of RNA in the LNP formulation was measured using the Ribogreen reagent. The diameter and polydispersity (PDI) of the LNP were determined by dynamic light scattering. Typical LNP had diameters ranging from 70 nm to 84 nm and PDI of 0.098 to 0.150.

### Mouse Dosing and Harvesting

[0464] LNPs for mRNA and sgRNA were mixed at 1:1 mass ratio and injected intravenously into 7 week-old C57B16 wild type mice via the tail vein (0.1 mL per mouse) at a total RNA dose of 0.5 mg RNA per kg body weight. Fourteen days after dosing, the mice were sacrificed, and the left lateral, medial, and right lateral lobes of the liver were collected for preparation of DNA, RNA, and protein, respectively. Blood was collected by exsanguination via cardiac puncture and collected onto BD microtainer (heparin coated). Samples were kept on wet ice for no longer than 30 minutes prior to centrifugation. Samples were centrifuged at 2,000 G for 10 minutes and the plasma transferred to 1.5 mL Cryotubes and stored at −80° C.

### Genomic DNA Preparation and Editing Analysis by Next-Generation Sequencing (NGS)

[0465] The left lateral lobe of the liver (100 mg) was homogenized in digestion buffer. Genomic DNA was purified from the resulting homogenate and quantified by measuring the absorbance at 260 nm. Genomic DNA purified from mice injected with PBS buffer alone was used as a control. The region of the HAO-1 gene targeted by each specific sgRNA was PCR amplified with Q5 high fidelity DNA polymerase and gene specific primers (Table 24) with adapters complementary to the barcoded primers used for next generation sequencing (NGS) for a total of 29 cycles. The product of this first PCR reaction was PCR amplified using the barcoded primers for NGS for a total of 10 cycles. The resulting product was subjected to NGS and the results were analyzed to generate the percentage of sequencing reads that contain insertions or deletions (INDELS) at the targeted site in the HAO-1 gene.

[0466] The NGS analysis of mouse liver genomic DNA showed that editing at the target site of the sgRNA in the HAO-1 gene of the groups dosed with LNP encapsulating MG3-6/3-4 mRNA and each of the five sgRNA ranged from 26% to 47% of total liver genomic DNA (FIG. 46). Chemistry 46 edited at the lowest efficiency. Guides with chemistry 48, 50, and 52 exhibited similar or somewhat higher levels of editing than the guide with chemistry 46. The guide with chemistry 53 had the highest editing efficiency at 47%, which was nearly twice the editing achieved with the guide with the same nucleotide sequence with chemistry 46.

TABLE 24
Primers used to amplify HAO1 guide target site and for NGS

| Guide | Primer | | |
|---|---|---|---|
| spacer | Set Name | Fwd with Miseq adapter | Rev with Miseq adapter |
| mH364-7 | mHAO1-NGS-P4 | GCTCTTCCGATCTNNNNNG | GCTCTTCCGATCTNNNNN |
| (spacer 7) | | TAAAGAAAAACAAGGAAT | ATCTGTCAACTTCTGTTTT |
| | | GTAAT (SEQ ID NO: 2910) | AGGAC (SEQ ID NO: 2911) |

### RNA Preparation and Analysis by RT-ddPCR

[0467] The medial lobe of the liver was stored in storage buffer to preserve the integrity of the RNA prior to homogenization. A maximum of 10 mg of tissue was transferred to a 2 mL tube containing 1.4 mm ceramic beads and homogenized. Homogenized tissue was then processed with an additional 45 minute on-column DNase I digestion treatment. The RNA products were quantified by measuring the absorbance at 260 nm. Isolated RNA samples then underwent an additional DNase treatment and reverse transcription. The cDNA product was then quantified by measuring the absorbance at 260 nm.

[0468] HAO1 mRNA levels were quantified using a custom ddPCR probe-based assay that was multiplexed with the housekeeping gene GAPDH. HAO1 was labeled with a HEX probe while GAPDH was labeled with a FAM probe. Both probes were flanked by primers specific to the respective genes creating amplicons of about 115 bp. The template material for the assay was 25 ng of cDNA product from the process above mixed with 900 nM of each primer and 250 nM of probe per gene assay, subject to ddPCR, and analyzed. Results were divided into four sections: negative droplets (no fluorescence), single positive droplets (HEX or FAM positive fluorescence), and double positive droplets (both HEX and FAM fluorescence). Copies per μL of HAO1 and GAPDH were calculated for each sample. The ratio of HAO1 to GAPDH was compared for mice treated with mH29-29 against mice treated with buffer only.

[0469] The knockdown of HAO1 mRNA in the livers of mice from the groups treated with LNP encapsulating the mH364-7 sgRNA and MG3-6/3-4 mRNA ranged from 36% to 58% lower than the untreated control group (FIG. 46). Editing of the HAO-1 gene that introduces out of frame (OOF) INDELS into the coding sequence may result in a reduction in the amount of HAO-1 mRNA as a result of nonsense mediated mRNA decay. The magnitude of reduction in HAO-1 mRNA by the guides with the 5 different chemical modifications correlated with the magnitude of genome editing efficiency, with guide chemistry 53 having the greatest knockdown, consistent with it having the highest indel %. Taken together, the genome editing and HAO-1 mRNA knockdown data indicate that guide chemistry 53 has improved potency in vivo.

TABLE 25
Primers and probes used in the amplification HAO1 and GAPDH ddPCR
assays

| Target | Probe | Probe | Fwd Primer | Rev primer |
|---|---|---|---|---|
| Gene | Fluorescence | Sequence | Sequence | sequence |
| HAO1 | HEX | AGTG+GGTG+C+C | GGGGAGAAAGGTG | CTCACCAATGTCT |
| | | A+GAAT+GTGAA | TTCAAGATGT (SEQ | TGTCGATGA (SEQ |
| | | (SEQ ID NO: 2912) | ID NO: 2914) | ID NO: 2916) |
| GAPDH | FAM | CATGACCA+CAGT | GCACCACCAACTGC | CCATCCACAGTCT |
| | | +C+CATGCCATC | TTAG (SEQ ID NO: | TCTGGG (SEQ ID |
| | | (SEQ ID NO: 2913) | 2915) | NO: 2917) |

Notations for chemical modifications: + = Locked Nucleic Acid (LNA) base modification.

### Example 29—Mammalian Cell Screening of MG3-6 Chimera (MG3-6/3-8) Across Multiple Gene Targets in Two Different Cell Types

[0470] It was previously demonstrated that a chimeric protein created by swapping the C-terminal end of the MG3-6 enzyme with its closely related homologs, specifically the WED and PAM-interacting domains, recognizes a new PAM sequence which corresponds to the PAM from the homolog Type II enzyme. MG3-6/3-8 (SEQ ID NO: 12), a chimera created by combining MG3-6 with the WED and PID domains from MG3-8, can successfully edit multiple target sites in human cell line. These results are expanded on herein by using the MG3-6/3-8 chimera at four additional loci in two new cell lines.

mRNA Production

[0471] Sequences for the MG3-6/3-8 chimera (SEQ ID NO: 12) mRNA were codon optimized for human expression, then synthesized and cloned into a high copy ampicillin plasmid. Synthesized constructs encoding a T7 promoter, UTRs, chimera ORF, and NLS sequences were digested from the backbone with HindII and BamHI, and ligated into a pUC19 plasmid backbone. The complete chimera mRNA plasmid consists of an origin of replication, ampicillin resistance cassette, the synthesized construct, and an encoded polyA tail. mRNA was synthesized via in vitro transcription (IVT) using the linearized chimera mRNA plasmid. This plasmid was linearized and purified with Phenol:Chloroform:Isoamyl Alcohol (25:24:1, v/v), precipitated in EtOH, and resuspended in nuclease free water at an adjusted concentration of 500 ng/μL. The IVT reaction to generate the mRNA was performed at 50° C. for 1 hour. After 1 hour, IVT was stopped, and plasmid DNA was digested with the addition of 250 U/mL DNaseI and incubated for 10 min at 37° C. Purification of mRNA was performed and the transcript concentration was determined by UV and further analyzed by capillary gel electrophoresis.

### Cell Culture, Transfections, Next Generation Sequencing, and Editing Analysis for Screens

[0472] Nucleofection of mRNA and guide (500 ng mRNA, 150 pmol guide) was performed in Hepa1-6 cells (100,000 cells per guide) and Hep3B cells (100,000 cells per guide) using an electroporator. Guides used for screening were chemically synthesized. Cells were harvested and genomic DNA prepared three days post-transfection. PCR primers appropriate for use in NGS-based DNA sequencing were generated, optimized, and used to amplify the individual target sequences for each guide RNA. The amplicons were sequenced and analyzed to measure gene editing.

### Results

[0473] To test the gene editing activity of the engineered MG3-6/3-8 chimera (SEQ ID NO: 12), 394 guides targeting the APOA1 (SEQ ID NOs: 1866-1961 and 2058-2088), ANPTL3 (SEQ ID NOs: 2120-2215 and 2312-2350), and TRAC (SEQ ID NOs: 2390-2485 and 2582-2617) genes in the mouse genome with MG3-6/3-8 (PAM sequence: nnRRnnYn (SEQ ID NO: 2863) were designed and purchased. These guides were co-transfected with in vitro-synthesized mRNA in Hepa1-6 (a mouse immortalized mouse hepatocyte cell line) or Hep3B (a human liver cell line) via nucleofection and were assayed for indel formation three days post-nucleofection. Altogether, the average indel formation was 40.7% at APOA1 (across 127 guides), 27.4% at ANGPTL3 (across 135 guides), and 25.1% at TRAC site (across 132 guides). 179 guides demonstrated greater than 80% indel formation. In conclusion, MG3-6/3-8 chimera shows robust gene editing across four independent loci, in both mouse and human cell lines (FIGS. 47-49).

### Example 30—In Vivo Gene Editing in Liver of Mice by the Chimeric Nuclease MG3-6/3-8 Delivered by Systemic Administration of a Lipid Nanoparticle

[0474] To evaluate the ability of the MG3-6/3-8 chimeric Type II nuclease to edit the genome in vivo, a lipid nanoparticle was used to deliver an mRNA encoding the MG3-6/3-8 nuclease and single guide RNAs (sgRNAs) that target exonic regions of the mouse APOA1 and ANGPTL3 genes (Table 26).

TABLE 26
sgRNAs and targeting spacer sequences used in mouse study

| Target | | |
|---|---|---|
| Site | Spacer DNA | |
| Name | sequence | sgRNA sequence |
| Apoa1 | TCTCCTGGAAAA | mU*mC*mU*rCrCrUrGrGrArArArArCrUrGrGrGrArCrArCrU |
| A4 | CTGGGACACT | rGrUrUrGrArGrArArUrCrGrArArArGrArUrUrCrUrUrArArUr |
| | (SEQ ID NO: 1986) | ArArGrGrCrArUrCrCrUrUrCrCrGrArUrGrCrUrGrArCrUrUrC |
| | | rUrCrArCrCrGrUrCrCrGrUrUrUrUrCrCrArArUrArGrGrArGr |
| | | CrGrGrGrCrGrGrUrArUrGrU*mU*mU*mU (SEQ ID NO: |
| | | 1890) |
| Apoa1 | CTGGGATAACCT | mC*mU*mG*rGrGrArUrArArCrCrUrGrGrArGrArArArGrArA |
| A5 | GGAGAAAGAA | rGrUrUrGrArGrArArUrCrGrArArArGrArUrUrCrUrUrArArUr |
| | (SEQ ID NO: 1994) | ArArGrGrCrArUrCrCrUrUrCrCrGrArUrGrCrUrGrArCrUrUrC |
| | | rUrCrArCrCrGrUrCrCrGrUrUrUrUrCrCrArArUrArGrGrArGr |
| | | CrGrGrGrCrGrGrUrArUrGrU*mU*mU*mU (SEQ ID NO: |
| | | 1898) |
| Apoa1 | TTGGGTGAGACA | mU*mU*mG*rGrGrUrGrArGrArCrArGrGrArGrArUrGrArAr |
| C5 | GGAGATGAAC | CrGrUrUrGrArGrArArUrCrGrArArArGrArUrUrCrUrUrArArU |
| | (SEQ ID NO: 1996) | rArArGrGrCrArUrCrCrUrUrCrCrGrArUrGrCrUrGrArCrUrUr |
| | | CrUrCrArCrCrGrUrCrCrGrUrUrUrUrCrCrArArUrArGrGrArG |
| | | rCrGrGrGrCrGrGrUrArUrGrU*mU*mU*mU (SEQ ID NO: |
| | | 1900) |
| Apoa1 | AGGAACGGCTG | mA*mG*mG*rArArCrGrGrCrUrGrGrGrCrCrCrArUrUrGrArC |
| F4 | GGCCCATTGAC | rGrUrUrGrArGrArArUrCrGrArArArGrArUrUrCrUrUrArArUr |
| | (SEQ ID NO: 1991) | ArArGrGrCrArUrCrCrUrUrCrCrGrArUrGrCrUrGrArCrUrUrC |
| | | rUrCrArCrCrGrUrCrCrGrUrUrUrUrCrCrArArUrArGrGrArGr |
| | | CrGrGrGrCrGrGrUrArUrGrU*mU*mU*mU (SEQ ID NO: |
| | | 1895) |
| Apoa1 | GGAACGGCTGG | mG*mG*mA*rArCrGrGrCrUrGrGrGrCrCrCrArUrUrGrArCrU |
| G4 | GCCCATTGACT | rGrUrUrGrArGrArArUrCrGrArArArGrArUrUrCrUrUrArArUr |
| | (SEQ ID NO: 1992) | ArArGrGrCrArUrCrCrUrUrCrCrGrArUrGrCrUrGrArCrUrUrC |
| | | rUrCrArCrCrGrUrCrCrGrUrUrUrUrCrCrArArUrArGrGrArGr |
| | | CrGrGrGrCrGrGrUrArUrGrU*mU*mU*mU (SEQ ID NO: |
| | | 1896) |
| Angptl | ACTATTAAACCA | mA*mC*mU*rArUrUrArArArCrCrArArGrArArArCrUrCrCrC |
| 3 C12 | AGAAACTCCC | rGrUrUrGrArGrArArUrCrGrArArArGrArUrUrCrUrUrArArUr |
| | (SEQ ID NO: 1993) | ArArGrGrCrArUrCrCrUrUrCrCrGrArUrGrCrUrGrArCrUrUrC |
| | | rUrCrArCrCrGrUrCrCrGrUrUrUrUrCrCrArArUrArGrGrArGr |
| | | CrGrGrGrCrGrGrUrArUrGrU*mU*mU*mU (SEQ ID NO: |
| | | 2210) |

(r = native ribose base, m = 2′-O methyl modified base, * = phosphorothioate bond)

[0475] The screen of sgRNAs targeting the APOA1 and ANGPTL3 coding sequences in mouse hepatocytes (Example 29) was used to identify highly active guides which were used for the in vivo mouse study (FIGS. 47-49). Specifically, sgRNAs MG3-6/3-8 mApoa1P1-A4 (SEQ ID NO: 1890), MG3-6/3-8 mApoa1P1-A5 (SEQ ID NO: 1898), MG3-6/3-8 mApoa1P1-C5 (SEQ ID NO: 1900), MG3-6/3-8 mApoa1P1-F4 (SEQ ID NO: 1895), and MG3-6/3-8 mAngptl3P1-C12 (SEQ ID NO: 2210), demonstrated greater than 95% editing in Hepa1-6 when transfected with the mRNA encoding the MG3-6/3-8 nuclease, and were selected for testing in mice. Additionally, MG3-6/3-8 mApoa1P1-G4 (SEQ ID NO: 1896), which demonstrated comparatively less editing (53%), was also chosen for the mouse study to inform on sites with moderate activity. Moreover, a number of chemical modifications of the native RNA structure were incorporated into these sgRNAs. These chemical modifications were selected based on their ability to improve the stability of the sgRNA in vitro when incubated in extracts from mammalian cells without negatively impacting editing activity.

Preparation of MG3-613-8 mRNA

[0476] The mRNA encoding the MG3-6/3-8 nuclease was generated by in vitro transcription of a linearized plasmid template. The DNA sequence that was transcribed into RNA comprised the following elements in order from 5′ to 3′: the T7 RNA polymerase promoter, a 5′ untranslated region (5′ UTR), a nuclear localization signal, a short linker, the coding sequence for the MG3-6/3-8 nuclease, a short linker, a nuclear localization signal, a 3′ untranslated region, and an approximately 100 nucleotide polyA tail (SEQ ID NO: 2865).

[0477] The protein sequence encoded in the synthetic mRNA encoded in this MG3-6/3-8 cassette comprises the following elements from 5′ to 3′: the nuclear localization signal from SV40, a five amino acid linker (GGGGS (SEQ ID NO: 2864)), the protein coding sequence of the MG3-6/3-8 nuclease from which the initiating methionine codon was removed, a 3 amino acid linker (SGG) and the nuclear localization signal from nucleoplasmin. The DNA sequence of the protein coding region of this cassette was modified to reflect the codon usage in humans using a commercially available algorithm. An approximately 100-nucleotide polyA tail (SEQ ID NO: 2865) was encoded in the plasmid used for in vitro transcription and the mRNA was co-transcriptionally capped. Uridine in the mRNA was replaced with N1-methyl pseudouridine.

### Preparation of Lipid Nanoparticles

[0478] The lipid nanoparticle (LNP) formulation used to deliver the MG3-6/3-8 mRNA and the guide RNA is based on LNP formulations as described above. The four lipid components were dissolved in ethanol and mixed in an appropriate molar ratio to make the lipid working mix. The mRNA and the guide RNA were mixed prior to formulation at a 1:1 mass ratio. RNA was diluted in 100 mM Sodium Acetate (pH 4.0) to make the RNA working stock. The lipid working stock and the RNA working stock were mixed in a microfluidics device. The LNPs were dialyzed against phosphate buffered saline (PBS) for 2 to 16 hours and then concentrated. The concentration of RNA in the LNP formulation was measured using the Ribogreen reagent. The diameter and polydispersity (PDI) of the LNP were determined by dynamic light scattering. Representative LNP diameters ranged from 65 nm to 120 nm with PDI of 0.05 to 0.20.

### Mouse Dosing and Harvesting

[0479] LNP for mRNA and sgRNA were mixed at 1:1 mass ratio and injected intravenously into 7-week-old C57B16 wild type mice via the tail vein (0.1 mL per mouse) at a total RNA dose of 1 mg RNA per kg body weight. Seven days post-dosing, all four mice in each group were sacrificed. The left liver lobe was collected and flash frozen.

### Genomic DNA Preparation and Editing Analysis by Next-Generation Sequencing (NGS)

[0480] The left lateral lobe of the liver (100 mg) was homogenized in digestion buffer. Genomic DNA was purified from the resulting homogenate and quantified by measuring the absorbance at 260 nm. Genomic DNA purified from mice injected with PBS buffer alone was used as a control. The region of the APOA1 and ANGPTL3 genes targeted by each specific sgRNA was PCR amplified with Q5 high fidelity DNA polymerase and gene specific primers with adapters complementary to the barcoded primers used for next generation sequencing (NGS) for a total of 29 cycles. The product of this first PCR reaction was PCR amplified using the barcoded primers for NGS for a total of 10 cycles. The resulting product was subjected to NGS, and the results were analyzed for the percentage of sequencing reads that contain insertions or deletions (indels) at the targeted site in the APOA1 and ANGPTL3 genes.

### Results

[0481] The gene editing results are summarized in Table 27.

TABLE 27
Analysis of the frequency of edits that result in frame shifts
(insertions/deletions) in the liver of mice
treated with LNP encapsulating MG3-6/3-8
mRNA and sgRNAs that target the APOA-1 and ANGPTL3 genes

| | | Mean | Stdev of | Mean OOF | Stdev OOF |
|---|---|---|---|---|---|
| Treatment | Guide | INDELS | INDELS | % total | % total |
| PBS control | Apoa1 A4 | 0.03 | 0.02 | 0.03 | 0.02 |
| | Apoa1 A5 | 0.01 | 0.01 | 0.01 | 0.01 |
| | Apoa1 C5 | 0.01 | 0.01 | 0.01 | 0.01 |
| | Apoa1 F4 | 0.04 | 0.01 | 0.04 | 0.01 |
| | Apoa1 G4 | 0.04 | 0.01 | 0.03 | 0.01 |
| | Angpt13 C12 | 0.02 | 0.01 | 0.02 | 0.01 |
| MG3-6_3-8 | Apoa1 A4 | 79.30 | 6.23 | 75.40 | 5.87 |
| | Apoa1 A5 | 65.23 | 3.96 | 55.51 | 3.49 |
| | Apoa1 C5 | 77.82 | 1.88 | 73.90 | 1.55 |
| | Apoa1 F4 | 43.07 | 13.67 | 30.37 | 11.77 |
| | Apoa1 G4 | 34.76 | 9.83 | 38.97 | 8.64 |
| | Angpt13 C12 | 42.80 | 3.34 | 37.18 | 3.12 |

[0482] The NGS analysis of mouse liver genomic DNA showed that editing at the target site of the sgRNA in the APOA1 and ANGPTL3 genes of the groups dosed with LNP encapsulating MG3-6/3-8 mRNA and each of the six sgRNA ranged from 35% to 80% of total liver genomic DNA (FIG. 50). There were minor differences between most of the treated groups, indicating robust and reproducible editing outcomes. Overall, the genome editing at APOA1 and ANGPTL3 sites to knockdown gene to regulate the downstream protein product using the MG3-6/3-8 chimeric nuclease demonstrates its therapeutic potential through targeted gene editing.

### Example 31—In Vitro Cleavage Activity of Type V-A Chimeric Nucleases

### Bioinformatics Analyses

[0483] 14 new protein variants of the Type V-A enzyme MG29-1 were engineered by concatenating domains from diverse homologs as well as from novel artificially designed nuclease sequences obtained through ancestral sequence reconstruction (ASR) (FIGS. 51-52). These novel Type V-A chimeras expand the PAM-targeting capabilities of MG29-1 enzyme beyond its canonical PAM sequence. Similar to previously engineered Type V-A chimeras MG29-1/29-5 (SEQ ID NO: 109) and MG29-1/57-1 (SEQ ID NO: 110), chimeric sequences were designed with novel MG29-1 homologs MG29-13 to MG29-21 (SEQ ID NOs: 2842-2849), as well as with more distant Type V-A nucleases, namely MG11-18 and MG79-1 (SEQ ID NOs: 2850-2851).

[0484] Additionally, in an effort to generate further diversity of Type V-A nucleases, ancestral sequence reconstruction (ASR) algorithms were used. ASR is a computational technique that uses existing protein sequences and the relationships inferred between them to reconstruct the sequences of ancient, now extinct, proteins. This technique was used to computationally reconstruct novel sequences of the Type V-A family to use for MG29-1 chimeragenesis. For this analysis, 330 Type V-A protein sequences were aligned and a phylogenetic tree was built (FIG. 52A). The trees were rooted using four Type V-L sequences as outgroups. Sequences were reconstructed and insertions and deletions were identified manually for each reconstructed node. Ultimately, three Type V-A ancestral sequences (MG29-229 to MG29-231) were reconstructed with high confidence and were chosen for chimeragenesis with MG29-1 (SEQ ID NOs: 2852-2854) (Table 28 and FIG. 52).

TABLE 28
Comparison of computationally-derived Type V-A ancestors
vs MG29-1, for Wed-II, PI, and Wed-III domains.

| Ancestral Parent | | | Swapped Domain |
|---|---|---|---|
| (WED II + | Mean | MG29-1 | Length |
| PID + WED-III ) | Support | % Identity | (amino acids) |
| MG29-229 | 0.94 | 65 | 295 |
| MG29-230 | 0.97 | 65 | 295 |
| MG29-231 | 0.96 | 64 | 294 |

Mean support values indicate the average probability for the reconstructed sequence, on a scale from 0 to 1. Support values >0.7 indicate high confidence in the reconstructed sequence.

[0485] Based on the predicted structure of MG29-1 and its alignment with the substrate-bound R-loop structure of FnCas12a (also called Cpf1), the boundaries of the WED-II, PID, and WED-III domains of MG29-1, its homologs, and the ancestral sequences, which are likely responsible the PAM sequence recognition and binding, were identified (FIGS. 51B and 52B).

[0486] A multiple sequence alignment of the select wild-type and ASR-generated Type V-A endonucleases, along with MG29-1 and the reference Cpf1, was constructed (FIG. 53A). Based on this alignment, the various functional domains of these novel MG enzymes were defined and used to subsequently determine the appropriate REC-WED-II and WED-III-RuvC breakpoints for chimeragenesis (FIGS. 53B-53C). Details of chimeric compositions are shown in Table 29.

TABLE 29
Chimeric architecture for using MG29-1 as chassis

| Chimera Type | Chimera name | WED-I REC | WED-II + PI + WED-III | RuvC + Nuc |
|---|---|---|---|---|
| Combination of all | MG29-1_29-13 | MG29-1(1, 560) | MG29-13 (558, 859) | MG29-1(862, 1280) |
| natural sequences | MG29-1_29-14 | MG29-1(1, 560) | MG29-14 (544, 845) | MG29-1(862, 1280) |
| | MG29-1_29-15 | MG29-1(1, 560) | MG29-15 (344, 645) | MG29-1(862, 1280) |
| | MG29-1_29-16 | MG29-1(1, 560) | MG29-16 (524, 825) | MG29-1(862, 1280) |
| | MG29-1_29-17 | MG29-1(1, 560) | MG29-17 (565, 866) | MG29-1(862, 1280) |
| | MG29-1_29-18 | MG29-1(1, 560) | MG29-18 (537, 830) | MG29-1(862, 1280) |
| | MG29-1_29-20 | MG29-1(1, 560) | MG29-20 (556, 857) | MG29-1(862, 1280) |
| | MG29-1_29-21 | MG29-1(1, 560) | MG29-21 (514, 815) | MG29-1(862, 1280) |
| | MG29-1_11-18 | MG29-1(1, 560) | MG11-18 (527, 872) | MG29-1(862, 1280) |
| | MG29-1_79-1 | MG29-1(1, 560) | MG79-1 (564, 865) | MG29-1(862, 1280) |
| Combination of natural | MG29-1_29-229 | MG29-1(1, 560) | MG29-1_29-229 (561, 855) | MG29-1(862, 1280) |
| sequence and ASR | MG29-1_29-230 | MG29-1(1, 560) | MG29-1_29-230 (561, 855) | MG29-1(862, 1280) |
| generated sequences | MG29-1_29-231 | MG29-1(1, 560) | MG29-1_29-231 (561, 854) | MG29-1(862, 1280) |

### Results

[0487] The PAM sequences of nucleases utilized herein were determined via expression in either an E. coli lysate-based expression system or reconstituted in in vitro translation. PAM enrichment assays with chimeric nucleases using the MG29-1 backbone and PID and WED domains from MG29 family homologs and ancestral sequences indicated that nine Type V-A chimeras were active when tested with the MG29-1 targeting guide RNA (FIGS. 54-55). The required PAM motifs are shown in FIG. 56 and summarized in Table 30.

TABLE 30
PAMs associated with the active chimeras derived from MG29-1.

| Chimera name | PAM sequence |
|---|---|
| MG29-1_29-13 | TTTn |
| MG29-1_29-14 | TYYn |
| MG29-1_29-15 | inactive |
| MG29-1_29-16 | TTTn |
| MG29-1_29-17 | inactive |
| MG29-1 29-18 | nYTn |
| MG29-1_29-20 | TTYn |
| MG29-1_29-21 | inactive |
| MG29-1_11-18 | inactive |
| MG29-1_79-1 | inactive |
| MG29-1_29-229 | nTTn |
| MG29-1_29-230 | nYYn |
| MG29-1_29-231 | nYYn |

### REFERENCES

[0488] Kauffman, K. J. et al. Optimization of Lipid Nanoparticle Formulations for mRNA Delivery in Vivo with Fractional Factorial and Definitive Screening Designs. Nano Lett 15, 7300-7306 (2015).
[0489] Harms, M. & Thornton J. W. Analyzing protein structure and function using ancestral gene reconstruction. Current Opinion in Structural Biology, 20:360-366 (2010).
[0490] Katoh K, Standley D M. MAFFT multiple sequence alignment software version 7: improvements in performance and usability. Mol Biol Evol. 2013; 30(4):772-780. doi:10.1093/molbev/mst010
[0491] Stamatakis, A. RAxML version 8: a tool for phylogenetic analysis and post-analysis of large phylogenies. Bioinformatics 30(9), 1312-1313 (2014).
[0492] Yang, Z. PAML 4: a program package for phylogenetic analysis by maximum likelihood. Molecular Biology and Evolution 24: 1586-1591 (2007).

[0493] While preferred embodiments of the present disclosure have been shown and described herein, it will be obvious to those skilled in the art that such embodiments are provided by way of example only. It is not intended that the disclosure be limited by the specific examples provided within the specification. While the disclosure has been described with reference to the aforementioned specification, the descriptions and illustrations of the embodiments herein are not meant to be construed in a limiting sense. Numerous variations, changes, and substitutions will now occur to those skilled in the art without departing from the disclosure. Furthermore, it shall be understood that all aspects of the disclosure are not limited to the specific depictions, configurations or relative proportions set forth herein which depend upon a variety of conditions and variables. It should be understood that various alternatives to the embodiments of the disclosure described herein may be employed in practicing the disclosure. It is therefore contemplated that the disclosure shall also cover any such alternatives, modifications, variations, or equivalents. It is intended that the following claims define the scope of the disclosure and that methods and structures within the scope of these claims and their equivalents be covered thereby.

What is claimed is:

1. An engineered endonuclease, comprising:
a) an N-terminal portion comprising a sequence having at least 80% sequence identity to SEQ ID NO: 696; and
b) a C-terminal portion comprising a sequence having at least 80% sequence identity to any one of SEQ ID NOs: 697-721.

2. The engineered endonuclease of claim 1, wherein the N-terminal portion and the C-terminal portion are fused directly to each other.

3. The engineered endonuclease of claim 1, wherein the N-terminal portion and the C-terminal portion are joined by a linker.

4. The engineered endonuclease of claim 3, wherein the linker is a glycine and/or serine-rich linker, a large protein domain, a long helix structure, or a short helix structure.

5. The engineered endonuclease of any one of claims 3-4, wherein the linker is (GGGGS)n, and wherein n is an integer from 1 to 20 SEQ ID NO: 2950).

6. The engineered endonuclease of any one of claims 3-4, wherein the linker is GGGGS (SEQ ID NO: 2864).

7. The engineered endonuclease of any one of claims 1-6, wherein the N-terminal portion comprises a sequence having at least 90% sequence identity to SEQ ID NO: 696.

8. The engineered endonuclease of any one of claims 1-6, wherein the N-terminal portion comprises a sequence having 100% sequence identity to SEQ ID NO: 696.

9. The engineered endonuclease of any one of claims 1-8, wherein the C-terminal portion comprises a sequence having at least 90% sequence identity to any one of SEQ ID NOs: 697-721.

10. The engineered endonuclease of any one of claims 1-8, wherein the C-terminal portion comprises a sequence having 100% sequence identity to any one of SEQ ID NOs: 697-721.

11. The engineered endonuclease of any one of claims 1-10, wherein the engineered endonuclease is configured to bind to a PAM that comprises any one of SEQ ID NOs: 60-66, 117, 865-919, and 2855-2863.

12. An engineered endonuclease comprising a sequence having at least 80% sequence identity to any one of SEQ ID NOs: 1-27 and 771-862.

13. The engineered endonuclease of claim 12, wherein the engineered endonuclease comprises a sequence having at least 90% sequence identity to any one of SEQ ID NOs: 1-27 and 771-862.

14. The engineered endonuclease of claim 12, wherein the engineered endonuclease comprises a sequence having 100% sequence identity to any one of SEQ ID NOs: 1-27 and 771-862.

15. An engineered endonuclease comprising a sequence having at least 80% sequence identity to SEQ ID NO: 10.

16. The engineered endonuclease of claim 15, wherein the engineered endonuclease comprises a sequence having at least 90% sequence identity to SEQ ID NO: 10.

17. The engineered endonuclease of claim 15, wherein the engineered endonuclease comprises a sequence having 100% sequence identity to SEQ ID NO: 10.

18. An engineered endonuclease comprising a sequence having at least 80% sequence identity to any one of SEQ ID NOs: 109-110 and 2842-2854.

19. The engineered endonuclease of claim 18, wherein the engineered endonuclease comprises a sequence having at least 90% sequence identity to any one of SEQ ID NOs: 109-110 and 2842-2854.

20. The engineered endonuclease of claim 18, wherein the engineered endonuclease comprises a sequence having 100% sequence identity to any one of SEQ ID NOs: 109-110 and 2842-2854.

21. An engineered nuclease system, comprising:
a) an engineered endonuclease comprising a sequence having at least 80% sequence identity to any one of SEQ ID NOs: 1-27 and 771-862; and
b) an engineered guide polynucleotide configured to form a complex with the endonuclease and to hybridize to a target nucleic acid sequence.

22. The engineered nuclease system of claim 21, wherein the engineered endonuclease comprises a sequence having at least 90% sequence identity to any one of SEQ ID NOs: 1-27 and 771-862.

23. The engineered nuclease system of claim 21, wherein the engineered endonuclease comprises a sequence having 100% sequence identity to any one of SEQ ID NOs: 1-27 and 771-862.

24. The engineered nuclease system of any one of claims 21-23, wherein the engineered guide polynucleotide is a single guide nucleic acid.

25. The engineered nuclease system of any one of claims 21-23, wherein the engineered guide polynucleotide is a dual guide nucleic acid.

26. The engineered nuclease system of any one of claims 21-23, wherein the engineered guide polynucleotide is RNA.

27. The engineered nuclease system of any one of claims 21-26, wherein the engineered endonuclease binds non-covalently to the engineered guide polynucleotide.

28. The engineered nuclease system of any one of claims 21-26, wherein the endonuclease is covalently linked to the engineered guide polynucleotide.

29. The engineered nuclease system of any one of claims 21-26, wherein the endonuclease is fused to the engineered guide polynucleotide.

30. The engineered nuclease system of any one of claims 21-29, wherein the engineered guide polynucleotide comprises a sequence having at least 90% sequence identity to any one of SEQ ID NOs: 28-45, 605-610, 646-695, 863, and 1789-1826.

31. The engineered nuclease system of any one of claims 21-29, wherein the engineered guide polynucleotide comprises a sequence having 100% sequence identity to any one of SEQ ID NOs: 28-45, 605-610, 646-695, 863, and 1789-1826.

32. The engineered nuclease system of any one of claims 21-31, wherein the engineered endonuclease is configured to bind to a PAM that comprises any one of SEQ ID NOs: 60-66, 865-919, and 2863.

33. An engineered nuclease system, comprising:
a) an engineered endonuclease comprising a sequence having at least 80% sequence identity to any one of SEQ ID NOs: 109-110 and 2842-2854; and
b) an engineered guide polynucleotide configured to form a complex with the endonuclease and to hybridize to a target nucleic acid sequence.

34. The engineered nuclease system of claim 33, wherein the engineered endonuclease comprises a sequence having at least 90% sequence identity to any one of SEQ ID NOs: 109-110 and 2842-2854.

35. The engineered nuclease system of claim 33, wherein the engineered endonuclease comprises a sequence having 100% sequence identity to any one of SEQ ID NOs: 109-110 and 2842-2854.

36. The engineered nuclease system of any one of claims 33-35, wherein the engineered guide polynucleotide is a single guide nucleic acid.

37. The engineered nuclease system of any one of claims 33-35, wherein the engineered guide polynucleotide is a dual guide nucleic acid.

38. The engineered nuclease system of any one of claims 33-35, wherein the engineered guide polynucleotide is RNA.

39. The engineered nuclease system of any one of claims 33-38, wherein the engineered endonuclease binds non-covalently to the engineered guide polynucleotide.

40. The engineered nuclease system of any one of claims 33-38, wherein the endonuclease is covalently linked to the engineered guide polynucleotide.

41. The engineered nuclease system of any one of claims 33-38, wherein the endonuclease is fused to the engineered guide polynucleotide.

42. The engineered nuclease system of any one of claims 33-41, wherein the engineered guide polynucleotide comprises a sequence having at least 90% sequence identity to any one of SEQ ID NOs: 111-113.

43. The engineered nuclease system of any one of claims 33-41, wherein the engineered guide polynucleotide comprises a sequence having 100% sequence identity to any one of SEQ ID NOs: 111-113.

44. The engineered nuclease system of any one of claims 33-43, wherein the engineered endonuclease is configured to bind to a PAM that comprises any one of SEQ ID NOs: 117 and 2855-2862.

45. An engineered nuclease system, comprising:
a) an engineered endonuclease comprising a sequence having at least 80% sequence identity to any one of SEQ ID NOs: 1-27 and 771-862; and
b) an engineered guide polynucleotide configured to form a complex with the endonuclease and comprising a spacer sequence configured to hybridize to at least a portion of a target nucleic acid sequence within an albumin gene or within an intron of an endogenous gene, the engineered guide polynucleotide comprising a sequence having at least 90% sequence identity to any one of SEQ ID NOs: 67-86.

46. An engineered nuclease system, comprising:
a) an engineered endonuclease comprising a sequence having at least 80% sequence identity to any one of SEQ ID NOs: 1-27 and 771-862; and
b) an engineered guide polynucleotide configured to form a complex with the endonuclease and comprising a spacer sequence configured to hybridize to at least a portion of a target nucleic acid sequence within a TRAC gene or within an intron of an endogenous gene, the engineered guide polynucleotide comprising a sequence having at least 90% sequence identity to any one of SEQ ID NOs: 119-138, 922-924, 972-991, 1088-1183, 1280-1320, 2390-2485, and 2582-2617.

47. The engineered nuclease system of claim 46, wherein the target nucleic acid sequence comprises a sequence having at least 90% sequence identity to any one of SEQ ID NOs: 139-158,925-927,992-1011, 1184-1279, 1321-1361, 2486-2581, and 2618-2653.

48. An engineered nuclease system, comprising:
a) an engineered endonuclease comprising a sequence having at least 80% sequence identity to any one of SEQ ID NOs: 1-27 and 771-862; and
b) an engineered guide polynucleotide configured to form a complex with the endonuclease and comprising a spacer sequence configured to hybridize to at least a portion of a target nucleic acid sequence within a B2M gene or within an intron of an endogenous gene, the engineered guide polynucleotide comprising a sequence having at least 90% sequence identity to any one of SEQ ID NOs: 159-184.

49. The engineered nuclease system of claim 48, wherein the target nucleic acid sequence comprises a sequence having at least 90% sequence identity to any one of SEQ ID NOs: 185-210.

50. An engineered nuclease system, comprising:
a) an engineered endonuclease comprising a sequence having at least 80% sequence identity to any one of SEQ ID NOs: 1-27 and 771-862; and
b) an engineered guide polynucleotide configured to form a complex with the endonuclease and comprising a spacer sequence configured to hybridize to at least a portion of a target nucleic acid sequence within a TRBC1 gene or within an intron of an endogenous gene, the engineered guide polynucleotide comprising a sequence having at least 90% sequence identity to any one of SEQ ID NOs: 211-251.

51. The engineered nuclease system of claim 50, wherein the target nucleic acid sequence comprises a sequence having at least 90% sequence identity to any one of SEQ ID NOs: 252-292.

52. An engineered nuclease system, comprising:
a) an engineered endonuclease comprising a sequence having at least 80% sequence identity to any one of SEQ ID NOs: 1-27 and 771-862; and
b) an engineered guide polynucleotide configured to form a complex with the endonuclease and comprising a spacer sequence configured to hybridize to at least a portion of a target nucleic acid sequence within a TRBC2 gene or within an intron of an endogenous gene, the engineered guide polynucleotide comprising a sequence having at least 90% sequence identity to any one of SEQ ID NOs: 293-337.

53. The engineered nuclease system of claim 52, wherein the target nucleic acid sequence comprises a sequence having at least 90% sequence identity to any one of SEQ ID NOs: 338-382.

54. An engineered nuclease system, comprising:
a) an engineered endonuclease comprising a sequence having at least 80% sequence identity to any one of SEQ ID NOs: 1-27 and 771-862; and
b) an engineered guide polynucleotide configured to form a complex with the endonuclease and comprising a spacer sequence configured to hybridize to at least a portion of a target nucleic acid sequence within an ANGPTL3 gene or within an intron of an endogenous gene, the engineered guide polynucleotide comprising a sequence having at least 90% sequence identity to any one of SEQ ID NOs: 383-477, 1392-1489, 2120-2215, and 2312-2350.

55. The engineered nuclease system of claim 54, wherein the target nucleic acid sequence comprises a sequence having at least 90% sequence identity to any one of SEQ ID NOs: 478-572, 1490-1587, 2216-2311, and 2351-2389.

56. An engineered nuclease system, comprising:
a) an engineered endonuclease comprising a sequence having at least 80% sequence identity to any one of SEQ ID NOs: 1-27 and 771-862; and
b) an engineered guide polynucleotide configured to form a complex with the endonuclease and comprising a spacer sequence configured to hybridize to at least a portion of a target nucleic acid sequence within a PCSK9 gene or within an intron of an endogenous gene, the engineered guide polynucleotide comprising a sequence having at least 90% sequence identity to any one of SEQ ID NOs: 573-587 and 1362-1376.

57. The engineered nuclease system of claim 56, wherein the target nucleic acid sequence comprises a sequence having at least 90% sequence identity to any one of SEQ ID NOs: 588-602 and 1377-1391.

58. An engineered nuclease system, comprising:
a) an engineered endonuclease comprising a sequence having at least 80% sequence identity to any one of SEQ ID NOs: 1-27 and 771-862; and
b) an engineered guide polynucleotide configured to form a complex with the endonuclease and comprising a spacer sequence configured to hybridize to at least a portion of a target nucleic acid sequence within a VCP gene or within an intron of an endogenous gene, the engineered guide polynucleotide comprising a sequence having at least 90% sequence identity to any one of SEQ ID NOs: 723-738 and 755-762.

59. The engineered nuclease system of claim 58, wherein the target nucleic acid sequence comprises a sequence having at least 90% sequence identity to any one of SEQ ID NOs: 739-754 and 763-770.

60. An engineered nuclease system, comprising:
a) an engineered endonuclease comprising a sequence having at least 80% sequence identity to any one of SEQ ID NOs: 1-27 and 771-862; and
b) an engineered guide polynucleotide configured to form a complex with the endonuclease and comprising a spacer sequence configured to hybridize to at least a portion of a target nucleic acid sequence within an AAVS1 locus or within an intron of an endogenous gene, the engineered guide polynucleotide comprising a sequence having at least 90% sequence identity to any one of SEQ ID NOs: 928-949 and 1012-1049.

61. The engineered nuclease system of claim 60, wherein the target nucleic acid sequence comprises a sequence having at least 90% sequence identity to any one of SEQ ID NOs: 950-971 and 1050-1087.

62. An engineered nuclease system, comprising:
a) an engineered endonuclease comprising a sequence having at least 80% sequence identity to any one of SEQ ID NOs: 1-27 and 771-862; and
b) an engineered guide polynucleotide configured to form a complex with the endonuclease and comprising a spacer sequence configured to hybridize to at least a portion of a target nucleic acid sequence within a GPR146 gene or within an intron of an endogenous gene, the engineered guide polynucleotide comprising a sequence having at least 90% sequence identity to any one of SEQ ID NOs: 1588-1656.

63. The engineered nuclease system of claim 62, wherein the target nucleic acid sequence comprises a sequence having at least 90% sequence identity to any one of SEQ ID NOs: 1657-1725.

64. An engineered nuclease system, comprising:
a) an engineered endonuclease comprising a sequence having at least 80% sequence identity to any one of SEQ ID NOs: 1-27 and 771-862; and
b) an engineered guide polynucleotide configured to form a complex with the endonuclease and comprising a spacer sequence configured to hybridize to at least a portion of a target nucleic acid sequence within an APOA1 gene or within an intron of an endogenous gene, the engineered guide polynucleotide comprising a sequence having at least 90% sequence identity to any one of SEQ ID NOs: 1726-1744, 1764-1774, 1866-1961 and 2058-2088.

65. The engineered nuclease system of claim 64, wherein the target nucleic acid sequence comprises a sequence having at least 90% sequence identity to any one of SEQ ID NOs: 1745-1763, 1775-1785, 1962-2057, and 2089-2119.

66. An engineered nuclease system, comprising:
a) an engineered endonuclease comprising a sequence having at least 80% sequence identity to any one of SEQ ID NOs: 1-27 and 771-862; and
b) an engineered guide polynucleotide configured to form a complex with the endonuclease and comprising a spacer sequence configured to hybridize to at least a portion of a target nucleic acid sequence within a HAO1 gene or within an intron of an endogenous gene, the engineered guide polynucleotide comprising a sequence having at least 90% sequence identity to any one of SEQ ID NOs: 611-633, 1789-1826, and 1827-1865.

67. A method for modifying a target nucleic acid sequence comprising contacting the target nucleic acid sequence using the endonuclease of any one of claims 1-32 or the engineered nuclease system of any one of claims 33-66.

68. The method of claim 67, wherein modifying the target nucleic acid sequence comprises binding, nicking, or cleaving, the target nucleic acid sequence.

69. The method of any one of claims 67-68, wherein the target nucleic acid sequence comprises genomic DNA, viral DNA, viral RNA, or bacterial DNA.

70. The method of any one of claims 67-69, wherein the modification is in vitro.

71. The method of any one of claims 67-69, wherein the modification is in vivo.

72. The method of any one of claims 67-69, wherein the modification is ex vivo.

73. The method of any one of claims 67-72, wherein the gRNA is encoded by a sequence having any one of SEQ ID NOs: 251-260, 271-274, and 279-290.

74. The method of any one of claims 67-72, wherein the target nucleic acid sequence comprises a sequence having any one of SEQ ID NOs: 261-270, 275-278, and 291-302.

75. A method of modifying a target nucleic acid sequence in a mammalian cell comprising contacting the mammalian cell using the endonuclease of any one of claims 1-32 or the engineered nuclease system of any one of claims 33-66.

76. The method of claim 75, further comprising selecting cells comprising the modification.

77. A method of modifying an albumin gene comprising contacting the albumin gene using an engineered nuclease system comprising:
a) an engineered endonuclease comprising a sequence having at least 80% sequence identity to any one of SEQ ID NOs: 1-27 and 771-862; and
b) an engineered guide polynucleotide configured to form a complex with the endonuclease and comprising a spacer sequence configured to hybridize to at least a portion of a target nucleic acid sequence within the albumin gene or within an intron of an endogenous gene, the engineered guide polynucleotide comprising a sequence having at least 90% sequence identity to any one of SEQ ID NOs: 67-86.

78. A method of modifying a TRAC gene comprising contacting the TRAC gene using an engineered nuclease system comprising:
a) an engineered endonuclease comprising a sequence having at least 80% sequence identity to any one of SEQ ID NOs: 1-27 and 771-862; and
b) an engineered guide polynucleotide configured to form a complex with the endonuclease and comprising a spacer sequence configured to hybridize to at least a portion of a target nucleic acid sequence within the TRAC gene or within an intron of an endogenous gene, the engineered guide polynucleotide comprising a sequence having at least 90% sequence identity to any one of SEQ ID NOs: 119-138, 922-924, 972-991, 1088-1183, 1280-1320, 2390-2485, and 2582-2617.

79. The method of claim 78, wherein the target nucleic acid sequence comprises a sequence having at least 90% sequence identity to any one of SEQ ID NOs: 139-158, 925-927, 992-1011, 1184-1279, 1321-1361, 2486-2581, and 2618-2653.

80. A method of modifying a B2M gene comprising contacting the B2M gene using an engineered nuclease system comprising:
a) an engineered endonuclease comprising a sequence having at least 80% sequence identity to any one of SEQ ID NOs: 1-27 and 771-862; and
b) an engineered guide polynucleotide configured to form a complex with the endonuclease and comprising a spacer sequence configured to hybridize to at least a portion of a target nucleic acid sequence within the B2M gene or within an intron of an endogenous gene, the engineered guide polynucleotide comprising a sequence having at least 90% sequence identity to any one of SEQ ID NOs: 159-184.

81. The method of claim 80, wherein the target nucleic acid sequence comprises a sequence having at least 90% sequence identity to any one of SEQ ID NOs: 185-210.

82. A method of modifying a TRBC1 gene comprising contacting the TRBC1 gene using an engineered nuclease system comprising:
a) an engineered endonuclease comprising a sequence having at least 80% sequence identity to any one of SEQ ID NOs: 1-27 and 771-862; and
b) an engineered guide polynucleotide configured to form a complex with the endonuclease and comprising a spacer sequence configured to hybridize to at least a portion of a target nucleic acid sequence within the TRBC1 gene or within an intron of an endogenous gene, the engineered guide polynucleotide comprising a sequence having at least 90% sequence identity to any one of SEQ ID NOs: 211-251.

83. The method of claim 82, wherein the target nucleic acid sequence comprises a sequence having at least 90% sequence identity to any one of SEQ ID NOs: 252-292.

84. A method of modifying a TRBC2 gene comprising contacting the TRBC2 gene using an engineered nuclease system comprising:
a) an engineered endonuclease comprising a sequence having at least 80% sequence identity to any one of SEQ ID NOs: 1-27 and 771-862; and
b) an engineered guide polynucleotide configured to form a complex with the endonuclease and comprising a spacer sequence configured to hybridize to at least a portion of a target nucleic acid sequence within the TRBC2 gene or within an intron of an endogenous gene, the engineered guide polynucleotide comprising a sequence having at least 90% sequence identity to any one of SEQ ID NOs: 293-337.

85. The method of claim 84, wherein the target nucleic acid sequence comprises a sequence having at least 90% sequence identity to any one of SEQ ID NOs: 338-382.

86. A method of modifying an ANGPTL3 gene comprising contacting the ANGPTL3 gene using an engineered nuclease system comprising:
a) an engineered endonuclease comprising a sequence having at least 80% sequence identity to any one of SEQ ID NOs: 1-27 and 771-862; and
b) an engineered guide polynucleotide configured to form a complex with the endonuclease and comprising a spacer sequence configured to hybridize to at least a portion of a target nucleic acid sequence within the ANGPTL3 gene or within an intron of an endogenous gene, the engineered guide polynucleotide comprising a sequence having at least 90% sequence identity to any one of SEQ ID NOs: 383-477, 1392-1489, 2120-2215, and 2312-2350.

87. The method of claim 86, wherein the target nucleic acid sequence comprises a sequence having at least 90% sequence identity to any one of SEQ ID NOs: 478-572, 1490-1587, 2216-2311, and 2351-2389.

88. A method of modifying a PCSK9 gene comprising contacting the PCSK9 gene using an engineered nuclease system comprising:
a) an engineered endonuclease comprising a sequence having at least 80% sequence identity to any one of SEQ ID NOs: 1-27 and 771-862; and
b) an engineered guide polynucleotide configured to form a complex with the endonuclease and comprising a spacer sequence configured to hybridize to at least a portion of a target nucleic acid sequence within the PCSK9 gene or within an intron of an endogenous gene, the engineered guide polynucleotide comprising a sequence having at least 90% sequence identity to any one of SEQ ID NOs: 573-587 and 1362-1376.

89. The method of claim 88, wherein the target nucleic acid sequence comprises a sequence having at least 90% sequence identity to any one of SEQ ID NOs: 588-602 and 1377-1391.

90. A method of modifying a VCP gene comprising contacting the VCP gene using an engineered nuclease system comprising:
a) an engineered endonuclease comprising a sequence having at least 80% sequence identity to any one of SEQ ID NOs: 1-27 and 771-862; and
b) an engineered guide polynucleotide configured to form a complex with the endonuclease and comprising a spacer sequence configured to hybridize to at least a portion of a target nucleic acid sequence within the VCP gene or within an intron of an endogenous gene, the engineered guide polynucleotide comprising a sequence having at least 90% sequence identity to any one of SEQ ID NOs: 723-738 and 755-762.

91. The method of claim 90, wherein the target nucleic acid sequence comprises a sequence having at least 90% sequence identity to any one of SEQ ID NOs: 739-754 and 763-770.

92. A method of modifying an AAVS1 locus comprising contacting the AAVS1 locus using an engineered nuclease system comprising:
a) an engineered endonuclease comprising a sequence having at least 80% sequence identity to any one of SEQ ID NOs: 1-27 and 771-862; and
b) an engineered guide polynucleotide configured to form a complex with the endonuclease and comprising a spacer sequence configured to hybridize to at least a portion of a target nucleic acid sequence within the AAVS1 locus or within an intron of an endogenous gene, the engineered guide polynucleotide comprising a sequence having at least 90% sequence identity to any one of SEQ ID NOs: 928-949 and 1012-1049.

93. The method of claim 92, wherein the target nucleic acid sequence comprises a sequence having at least 90% sequence identity to any one of SEQ ID NOs: 950-971 and 1050-1087.

94. A method of modifying a GPR146 gene comprising contacting the GPR146 gene using an engineered nuclease system comprising:
a) an engineered endonuclease comprising a sequence having at least 80% sequence identity to any one of SEQ ID NOs: 1-27 and 771-862; and
b) an engineered guide polynucleotide configured to form a complex with the endonuclease and comprising a spacer sequence configured to hybridize to at least a portion of a target nucleic acid sequence within the GPR146 gene or within an intron of an endogenous gene, the engineered guide polynucleotide comprising a sequence having at least 90% sequence identity to any one of SEQ ID NOs: 1588-1656.

95. The method of claim 94, wherein the target nucleic acid sequence comprises a sequence having at least 90% sequence identity to any one of SEQ ID NOs: 1657-1725.

96. A method of modifying an APOA1 gene comprising contacting the APOA1 gene using an engineered nuclease system comprising:
a) an engineered endonuclease comprising a sequence having at least 80% sequence identity to any one of SEQ ID NOs: 1-27 and 771-862; and
b) an engineered guide polynucleotide configured to form a complex with the endonuclease and comprising a spacer sequence configured to hybridize to at least a portion of a target nucleic acid sequence within the APOA1 gene or within an intron of an endogenous gene, the engineered guide polynucleotide comprising a sequence having at least 90% sequence identity to any one of SEQ ID NOs: 1726-1744, 1764-1774, 1866-1961 and 2058-2088.

97. The method of claim 96, wherein the target nucleic acid sequence comprises a sequence having at least 90% sequence identity to any one of SEQ ID NOs: 1745-1763, 1775-1785, 1962-2057, and 2089-2119.

98. A method of modifying a TRAC gene comprising contacting the TRAC gene using an engineered nuclease system comprising:
a) an engineered endonuclease comprising a sequence having at least 80% sequence identity to any one of SEQ ID NOs: 1-27 and 771-862; and
b) an engineered guide polynucleotide configured to form a complex with the endonuclease and comprising a spacer sequence configured to hybridize to at least a portion of a target nucleic acid sequence within a HAO1 gene or within an intron of an endogenous gene, the engineered guide polynucleotide comprising a sequence having at least 90% sequence identity to any one of SEQ ID NOs: 611-633, 1789-1826, and 1827-1865.

99. A cell comprising the endonuclease of any one of claims 1-32 or the engineered nuclease system of any one of claims 33-66.

100. The cell of claim 99, wherein the cell is a eukaryotic cell.

101. The cell of claim 99, wherein the cell is a mammalian cell.

102. The cell of claim 99, wherein the cell is an immortalized cell.

103. The cell of claim 99, wherein the cell is an insect cell.

104. The cell of claim 99, wherein the cell is a yeast cell.

105. The cell of claim 99, wherein the cell is a plant cell.

106. The cell of claim 99, wherein the cell is a fungal cell.

107. The cell of claim 99, wherein the cell is a prokaryotic cell.

108. The cell of claim 99, wherein the cell is an A549, HEK-293, HEK-293T, BHK, CHO, HeLa, MRC5, Sf9, Cos-1, Cos-7, Vero, BSC 1, BSC 40, BMT 10, WI38, HeLa, Saos, C2C12, L cell, HT1080, HepG2, Huh7, K562, primary cell, or a derivative thereof.

109. The cell of claim 99, wherein the cell is an engineered cell.

110. The cell of claim 99, wherein the cell is a stable cell.

The application's sequence listing, which the Patent Office published only in electronic form, follows.

SEQUENCE LISTING (2963 sequences)

SEQ ID NO: 1 - protein, 1018 aa, synthetic construct
  REGION 1..1018: note = Category: MG3 chimeric effectors
  REGION 1..1018: note = Description: MG3-6_1-4 chimera
MSTDMKNYRIGVDVGDRSVGLAAIEFDDDGLPIQKLALVTFRHDGGLDPTKNKTPMSRKETRGIARRTMRMNRERKRRLRNLDNVLENLGYSVPEGPEPETYEAWTSRALLASIKLASADELNEHLVRAVRHMARHRGWANPWWSLDQLEKASQEPSETFEIILARARELFGEKVPANPTLGMLGALAANNEVLLRPRDEKKRKTGYVRGTPLMFAQVRQGDQLAELRRICEVQGIEDQYEALRLGVFDHKHPYVPKERVGKDPLNPSTNRTIRASLEFQEFRILDSVANLRVRIGSRAKRELTEAEYDAAVEFLMDYADKEQPSWADVAEKIGVPGNRLVAPVLEDVQQKTAPYDRSSAAFEKAMGKKTEARQWWESTDDDQLRSLLIAFLVDATNDTEEAAAEAGLSELYKSWPAEEREALSNIDFEKGRVAYSQETLSKLSEYMHEYRVGLHEARKAVFGVDDTWRPPLDKLEEPTGQPAVDRVLTILRRFVLDCERQWGRPRAITVEHTRTGLMGPTQRQKILNEQKKNRADNERIRDELRESGVDNPSRAEVRRHLIVQEQECQCLYCGTMITTTTSELDHIVPRAGGGSSRRENLAAVCRACNAKKKRELFYAWAGPVKSQETIERVRQLKAFKDSKKAKMFKNQIRRLNQTEADEPIDERSLASTSYAAVAVRERLEQHFNEGLALDDKSRVVLDVYAGAVTRESRRAGGIDERILLRGERDKNRFDVRHHAVDAICISFSRDFKYDKEIKKDIIKGFNPEIVKNAIDKIMPYPYANDKPFKGNTKPLETIYGLRTYGDKSYITQRVELNSIDKKATKIKSIIDETIKNDLLNKLKENPTEQEWKLMLQNYIHPKKQTKVKKVMISVSEGEITKDSNNRERMGEFVDFGTKGTQHQFKHSKRHKGQILYFNEKGVVEVMPVYSNIKTTDVKDKLQNMGCKLYNKGQMFYSGCLVDIPKPFKAGSKEYPAGRYQIKTIRSDKVAELEDACGNKISTNVKYLVPAEFKKVESK

SEQ ID NO: 2 - protein, 1031 aa, synthetic construct
  REGION 1..1031: note = Category: MG3 chimeric effectors
  REGION 1..1031: note = Description: MG3-6_1-5 chimera
MSTDMKNYRIGVDVGDRSVGLAAIEFDDDGLPIQKLALVTFRHDGGLDPTKNKTPMSRKETRGIARRTMRMNRERKRRLRNLDNVLENLGYSVPEGPEPETYEAWTSRALLASIKLASADELNEHLVRAVRHMARHRGWANPWWSLDQLEKASQEPSETFEIILARARELFGEKVPANPTLGMLGALAANNEVLLRPRDEKKRKTGYVRGTPLMFAQVRQGDQLAELRRICEVQGIEDQYEALRLGVFDHKHPYVPKERVGKDPLNPSTNRTIRASLEFQEFRILDSVANLRVRIGSRAKRELTEAEYDAAVEFLMDYADKEQPSWADVAEKIGVPGNRLVAPVLEDVQQKTAPYDRSSAAFEKAMGKKTEARQWWESTDDDQLRSLLIAFLVDATNDTEEAAAEAGLSELYKSWPAEEREALSNIDFEKGRVAYSQETLSKLSEYMHEYRVGLHEARKAVFGVDDTWRPPLDKLEEPTGQPAVDRVLTILRRFVLDCERQWGRPRAITVEHTRTGLMGPTQRQKILNEQKKNRADNERIRDELRESGVDNPSRAEVRRHLIVQEQECQCLYCGTMITTTTSELDHIVPRAGGGSSRRENLAAVCRACNAKKKRELFYAWAGPVKSQETIERVRQLKAFKDSKKAKMFKNQIRRLNQTEADEPIDERSLASTSYAAVAVRERLEQHFNEGLALDDKSRVVLDVYAGAVTRESRRAGGIDERILLRGERDKNRFDVRHHAVDAMCICFAPTSNAKKALSRKNILPEEIAKNPESDDARNFFAKYLAEVVPTKVAIKKPELEQTIYSKRVIGGRQTIVKKCNVRDLAYKGQNPKYDFDTLTKRIKDIINPVSKRVIEDFAKTEPTEAEWEDWCKYEAAIPSKNGSPTRLLRVLCKTKDDAERFKDLSKDGCGAYRKSKSHKGQFIWKDNKGNYLVAPVYIYSSKQKVYAELKNNPKCMGICDFFKTGCLVKISNEVVDEKKNRLWLKAGFYNLNSIAKEKRVYLTDVNGQEHKKIPLQHLMNAGMKRVETNTI

SEQ ID NO: 3 - protein, 1029 aa, synthetic construct
  REGION 1..1029: note = Category: MG3 chimeric effectors
  REGION 1..1029: note = Description: MG3-6_1-6 chimera
MSTDMKNYRIGVDVGDRSVGLAAIEFDDDGLPIQKLALVTFRHDGGLDPTKNKTPMSRKETRGIARRTMRMNRERKRRLRNLDNVLENLGYSVPEGPEPETYEAWTSRALLASIKLASADELNEHLVRAVRHMARHRGWANPWWSLDQLEKASQEPSETFEIILARARELFGEKVPANPTLGMLGALAANNEVLLRPRDEKKRKTGYVRGTPLMFAQVRQGDQLAELRRICEVQGIEDQYEALRLGVFDHKHPYVPKERVGKDPLNPSTNRTIRASLEFQEFRILDSVANLRVRIGSRAKRELTEAEYDAAVEFLMDYADKEQPSWADVAEKIGVPGNRLVAPVLEDVQQKTAPYDRSSAAFEKAMGKKTEARQWWESTDDDQLRSLLIAFLVDATNDTEEAAAEAGLSELYKSWPAEEREALSNIDFEKGRVAYSQETLSKLSEYMHEYRVGLHEARKAVFGVDDTWRPPLDKLEEPTGQPAVDRVLTILRRFVLDCERQWGRPRAITVEHTRTGLMGPTQRQKILNEQKKNRADNERIRDELRESGVDNPSRAEVRRHLIVQEQECQCLYCGTMITTTTSELDHIVPRAGGGSSRRENLAAVCRACNAKKKRELFYAWAGPVKSQETIERVRQLKAFKDSKKAKMFKNQIRRLNQTEADEPIDERSLASTSYAAVAVRERLEQHFNEGLALDDKSRVVLDVYAGAVTRESRRAGGIDERILLRGERDKNRFDVRHHAVDAMCLCFAPTGVDSRRAKLGEILPEKLRSEKAAREFFKSYLDKIMPVDVAPKKPRLEDGIYSKRIIGGKACMVKRNNLVDLAYKSGLKPVFDIPTLIKLVDKKEKGIINPQIRKMIGEFAATNPDESAWRKWCEEVRLPSKSGLGARVLRVLVYYGEADEYKDLSKDGCGAYRKGDGHKGQVVWESVDGKYYVEPVYVHASKAGVMAALNANPKKKRICGMFNSHCTVDVGDVYNDRGDFILPAGRYMVNTILTTGRCVLTNADGEKRNPININYLMRAGMRRVELSEL

SEQ ID NO: 4 - protein, 1029 aa, synthetic construct
  REGION 1..1029: note = Category: MG3 chimeric effectors
  REGION 1..1029: note = Description: MG3-6_1-7 chimera
MSTDMKNYRIGVDVGDRSVGLAAIEFDDDGLPIQKLALVTFRHDGGLDPTKNKTPMSRKETRGIARRTMRMNRERKRRLRNLDNVLENLGYSVPEGPEPETYEAWTSRALLASIKLASADELNEHLVRAVRHMARHRGWANPWWSLDQLEKASQEPSETFEIILARARELFGEKVPANPTLGMLGALAANNEVLLRPRDEKKRKTGYVRGTPLMFAQVRQGDQLAELRRICEVQGIEDQYEALRLGVFDHKHPYVPKERVGKDPLNPSTNRTIRASLEFQEFRILDSVANLRVRIGSRAKRELTEAEYDAAVEFLMDYADKEQPSWADVAEKIGVPGNRLVAPVLEDVQQKTAPYDRSSAAFEKAMGKKTEARQWWESTDDDQLRSLLIAFLVDATNDTEEAAAEAGLSELYKSWPAEEREALSNIDFEKGRVAYSQETLSKLSEYMHEYRVGLHEARKAVFGVDDTWRPPLDKLEEPTGQPAVDRVLTILRRFVLDCERQWGRPRAITVEHTRTGLMGPTQRQKILNEQKKNRADNERIRDELRESGVDNPSRAEVRRHLIVQEQECQCLYCGTMITTTTSELDHIVPRAGGGSSRRENLAAVCRACNAKKKRELFYAWAGPVKSQETIERVRQLKAFKDSKKAKMFKNQIRRLNQTEADEPIDERSLASTSYAAVAVRERLEQHFNEGLALDDKSRVVLDVYAGAVTRESRRAGGIDERILLRGERDKNRFDVRHHAVDAMCLCFAPTGVNSKRARVDMLLPPKIRSEKEAELFFRKYLDKLIPVDVAPKKPKLEDGIYSMRTVGGKKIMARRVNLVDLAYKSGLKPVYDVSVLIKLLDKKERGIINPQIRKLVADFARTNPSEDEWKKWCGECRLPSKNGLGTRVIRVLLNYGEPAEYKDLSKDGRGAFRRGDGHKGQIVWESTDGKYCVLPIYVHASKAKLLAELCANPKKKRICGIFTSHCMVKVGNTYNNKGELLLPEGVYMLNTIRTDGWIQLTSANGDKSKPININYLMKAGMKKVPVKDL

SEQ ID NO: 5 - protein, 1068 aa, synthetic construct
  REGION 1..1068: note = Category: MG3 chimeric effectors
  REGION 1..1068: note = Description: MG3-6_2-4 chimera
MSTDMKNYRIGVDVGDRSVGLAAIEFDDDGLPIQKLALVTFRHDGGLDPTKNKTPMSRKETRGIARRTMRMNRERKRRLRNLDNVLENLGYSVPEGPEPETYEAWTSRALLASIKLASADELNEHLVRAVRHMARHRGWANPWWSLDQLEKASQEPSETFEIILARARELFGEKVPANPTLGMLGALAANNEVLLRPRDEKKRKTGYVRGTPLMFAQVRQGDQLAELRRICEVQGIEDQYEALRLGVFDHKHPYVPKERVGKDPLNPSTNRTIRASLEFQEFRILDSVANLRVRIGSRAKRELTEAEYDAAVEFLMDYADKEQPSWADVAEKIGVPGNRLVAPVLEDVQQKTAPYDRSSAAFEKAMGKKTEARQWWESTDDDQLRSLLIAFLVDATNDTEEAAAEAGLSELYKSWPAEEREALSNIDFEKGRVAYSQETLSKLSEYMHEYRVGLHEARKAVFGVDDTWRPPLDKLEEPTGQPAVDRVLTILRRFVLDCERQWGRPRAITVEHTRTGLMGPTQRQKILNEQKKNRADNERIRDELRESGVDNPSRAEVRRHLIVQEQECQCLYCGTMITTTTSELDHIVPRAGGGSSRRENLAAVCRACNAKKKRELFYAWAGPVKSQETIERVRQLKAFKDSKKAKMFKNQIRRLNQTEADEPIDERSLASTSYAAVAVRERLEQHFNEGLALDDKSRVVLDVYAGAVTRESRRAGGIDERILLRGERDKNRFDVRHHAVDALTLGLATALVPGIERKELRRALSLRQAKGDDATLLRSDPKLGEALRWRTEDRFEAAPLSGKLESAVRRALAEGRVVQHVPAKRQGMKVDSNFFGFVEFDETGRLRVRQKMRSPTTRRREIKTTVKNGKNLHTLSHLSLDPKSWLGAPDHPLRRKQLEHGLRTENDLANPKLGNIRGMLPIRENWGIALITKDGSPRLDVIPYINVHQWLEVLALENGGGSPVVLRKGHLVGFDAEKCPEEYCGAWMLLGVKDGRSGTTLELIRPWMVAPRKGGTKESSAKQAIKPASGYSEKEGKASGVFLQRSADVFLKLGLRPLDHDLTGIAAF

SEQ ID NO: 6 - protein, 1006 aa, synthetic construct
  REGION 1..1006: note = Category: MG3 chimeric effectors
  REGION 1..1006: note = Description: MG3-6_2-7 chimera
MSTDMKNYRIGVDVGDRSVGLAAIEFDDDGLPIQKLALVTFRHDGGLDPTKNKTPMSRKETRGIARRTMRMNRERKRRLRNLDNVLENLGYSVPEGPEPETYEAWTSRALLASIKLASADELNEHLVRAVRHMARHRGWANPWWSLDQLEKASQEPSETFEIILARARELFGEKVPANPTLGMLGALAANNEVLLRPRDEKKRKTGYVRGTPLMFAQVRQGDQLAELRRICEVQGIEDQYEALRLGVFDHKHPYVPKERVGKDPLNPSTNRTIRASLEFQEFRILDSVANLRVRIGSRAKRELTEAEYDAAVEFLMDYADKEQPSWADVAEKIGVPGNRLVAPVLEDVQQKTAPYDRSSAAFEKAMGKKTEARQWWESTDDDQLRSLLIAFLVDATNDTEEAAAEAGLSELYKSWPAEEREALSNIDFEKGRVAYSQETLSKLSEYMHEYRVGLHEARKAVFGVDDTWRPPLDKLEEPTGQPAVDRVLTILRRFVLDCERQWGRPRAITVEHTRTGLMGPTQRQKILNEQKKNRADNERIRDELRESGVDNPSRAEVRRHLIVQEQECQCLYCGTMITTTTSELDHIVPRAGGGSSRRENLAAVCRACNAKKKRELFYAWAGPVKSQETIERVRQLKAFKDSKKAKMFKNQIRRLNQTEADEPIDERSLASTSYAAVAVRERLEQHFNEGLALDDKSRVVLDVYAGAVTRESRRAGGIDERILLRGERDKNRFDVRHHAVDAVTQGLALLLFAPEDWPLLVKRNLPDSEQRHLKARYPFLDFSADKHISIQDLPEDTLHTISERLAECRVVRHIPAKMHGIIVDQTTWGTVAAGAITTLRQKTTEKNARCDENGKRFIKTTEKKRSLLLGGPDAPDGKLAKIKGAILVTENWGCALDPSPTVIPHFKVYPQLRALREKNGGRPIRILRKGSLIQVKAGTYQGIWSVASIKDNADGICLDINAADKVKLENRSDDSKINVRLDSLRKSGLKILKPKLTGACPTTSSP

SEQ ID NO: 7 - protein, 1109 aa, synthetic construct
  REGION 1..1109: note = Category: MG3 chimeric effectors
  REGION 1..1109: note = Description: MG3-6_3-1 chimera
MSTDMKNYRIGVDVGDRSVGLAAIEFDDDGLPIQKLALVTFRHDGGLDPTKNKTPMSRKETRGIARRTMRMNRERKRRLRNLDNVLENLGYSVPEGPEPETYEAWTSRALLASIKLASADELNEHLVRAVRHMARHRGWANPWWSLDQLEKASQEPSETFEIILARARELFGEKVPANPTLGMLGALAANNEVLLRPRDEKKRKTGYVRGTPLMFAQVRQGDQLAELRRICEVQGIEDQYEALRLGVFDHKHPYVPKERVGKDPLNPSTNRTIRASLEFQEFRILDSVANLRVRIGSRAKRELTEAEYDAAVEFLMDYADKEQPSWADVAEKIGVPGNRLVAPVLEDVQQKTAPYDRSSAAFEKAMGKKTEARQWWESTDDDQLRSLLIAFLVDATNDTEEAAAEAGLSELYKSWPAEEREALSNIDFEKGRVAYSQETLSKLSEYMHEYRVGLHEARKAVFGVDDTWRPPLDKLEEPTGQPAVDRVLTILRRFVLDCERQWGRPRAITVEHTRTGLMGPTQRQKILNEQKKNRADNERIRDELRESGVDNPSRAEVRRHLIVQEQECQCLYCGTMITTTTSELDHIVPRAGGGSSRRENLAAVCRACNAKKKRELFYAWAGPVKSQETIERVRQLKAFKDSKKAKMFKNQIRRLNQTEADEPIDERSLASTSYAAVAVRERLEQHFNEGLALDDKSRVVLDVYAGAVTRESRRAGGIDERILLRGERDKNRFDVRHHAVDAAVLTLQSPAIYRVLLTRVNLKHEHEVTGEAPEWRDYEGADQAEKVLYRRWQKNIATLAELMRQEIENNRVPVTRPIRLRKSRGAVHDATVMKALERDLWGEWDAQAIDRLVDPELHLALRKLFTSTKSKKIDVDATSQGLPERYLANQTVQLFDADAPSVMSPRGILRIGAGTHHARLLTWDDPKKGPQLGIQRVFAAEFGEILKDASSNDLFEAPIPFHTMSHRDLQPKVRAAVEQGLTRQIGWITQGDELEIDPADFVGEANAFGNFLREFPERSWSIAGLKKSNTIVIRPLLLSQEGVTAAISPHAAKIVENGIELSNSTLFTAPGTGIIRRTGLGRPRWDSGPAHLPESFNVHARMTQQSARD

SEQ ID NO: 8 - protein, 1122 aa, synthetic construct
  REGION 1..1122: note = Category: MG3 chimeric effectors
  REGION 1..1122: note = Description: MG3-6_3-2 chimera
MSTDMKNYRIGVDVGDRSVGLAAIEFDDDGLPIQKLALVTFRHDGGLDPTKNKTPMSRKETRGIARRTMRMNRERKRRLRNLDNVLENLGYSVPEGPEPETYEAWTSRALLASIKLASADELNEHLVRAVRHMARHRGWANPWWSLDQLEKASQEPSETFEIILARARELFGEKVPANPTLGMLGALAANNEVLLRPRDEKKRKTGYVRGTPLMFAQVRQGDQLAELRRICEVQGIEDQYEALRLGVFDHKHPYVPKERVGKDPLNPSTNRTIRASLEFQEFRILDSVANLRVRIGSRAKRELTEAEYDAAVEFLMDYADKEQPSWADVAEKIGVPGNRLVAPVLEDVQQKTAPYDRSSAAFEKAMGKKTEARQWWESTDDDQLRSLLIAFLVDATNDTEEAAAEAGLSELYKSWPAEEREALSNIDFEKGRVAYSQETLSKLSEYMHEYRVGLHEARKAVFGVDDTWRPPLDKLEEPTGQPAVDRVLTILRRFVLDCERQWGRPRAITVEHTRTGLMGPTQRQKILNEQKKNRADNERIRDELRESGVDNPSRAEVRRHLIVQEQECQCLYCGTMITTTTSELDHIVPRAGGGSSRRENLAAVCRACNAKKKRELFYAWAGPVKSQETIERVRQLKAFKDSKKAKMFKNQIRRLNQTEADEPIDERSLASTSYAAVAVRERLEQHFNEGLALDDKSRVVLDVYAGAVTRESRRAGGIDERILLRGERDKNRFDVRHHAVDAAVLTLLDPSVAKTLAMRLDLKREQQDSGRDTRWKEFKGLTPASQERFIKWCQASECLADMLRQQIEADRVPVVVPLRISPSNGAVHDDSVRPLTRQKIDSTWDRKSINRIVDPEIHVAMRRLLNNGTSLPEDKNRVLDLPDGNELGPHDEVELFSTSAASIKLRRGGSAEIGGSIHHARVYAWMGAKGQLEYGMMRVFGAEFPTLTKLSGSKDILRMPIHAGSMSYRDMQDRVRKPIESDIAVELGWITQGDELEILPEAHLETAGGLGDFLKSFPETQWTIDGFNDPSRLRVRPRLMSLEGRDTIDAMGHLSDTEKLKIKQALSKGLMVSASELLSHGAKIIRRDHLGRPRWRGNARPVSIELEQVANQLVNHRSVDGQ

SEQ ID NO: 9 - protein, 1125 aa, synthetic construct
  REGION 1..1125: note = Category: MG3 chimeric effectors
  REGION 1..1125: note = Description: MG3-6_3-3 chimera
MSTDMKNYRIGVDVGDRSVGLAAIEFDDDGLPIQKLALVTFRHDGGLDPTKNKTPMSRKETRGIARRTMRMNRERKRRLRNLDNVLENLGYSVPEGPEPETYEAWTSRALLASIKLASADELNEHLVRAVRHMARHRGWANPWWSLDQLEKASQEPSETFEIILARARELFGEKVPANPTLGMLGALAANNEVLLRPRDEKKRKTGYVRGTPLMFAQVRQGDQLAELRRICEVQGIEDQYEALRLGVFDHKHPYVPKERVGKDPLNPSTNRTIRASLEFQEFRILDSVANLRVRIGSRAKRELTEAEYDAAVEFLMDYADKEQPSWADVAEKIGVPGNRLVAPVLEDVQQKTAPYDRSSAAFEKAMGKKTEARQWWESTDDDQLRSLLIAFLVDATNDTEEAAAEAGLSELYKSWPAEEREALSNIDFEKGRVAYSQETLSKLSEYMHEYRVGLHEARKAVFGVDDTWRPPLDKLEEPTGQPAVDRVLTILRRFVLDCERQWGRPRAITVEHTRTGLMGPTQRQKILNEQKKNRADNERIRDELRESGVDNPSRAEVRRHLIVQEQECQCLYCGTMITTTTSELDHIVPRAGGGSSRRENLAAVCRACNAKKKRELFYAWAGPVKSQETIERVRQLKAFKDSKKAKMFKNQIRRLNQTEADEPIDERSLASTSYAAVAVRERLEQHFNEGLALDDKSRVVLDVYAGAVTRESRRAGGIDERILLRGERDKNRFDVRHHAVDAAVMTLLNPSVAVTLEQRRMLKQENDYSSPRGQHDNGWRDFIGRGEASQSKFLHWKKTAVVLADLISEAIEQDTIPVVNPLRLRPQNGSVHKDTVEAVLERTVGDSWTDKQVSRIVDPNTYIAFLSLLGRKKELDADHQRLVSVSAGVKLLADERVQIFPEEAASILTPRGVVKIGDSIHHARLYGWKNQRGDIQVGMLRVFGAEFPWFMRESGVKDILRVPIPQGSQSYRDLAATTRKFIENGQATEFGWITQNDEIEISAEEYLATDKGDILSDFLGILPEIRWKVTGIEDNRRIRLRPLLLSSEAIPNMLNGRLLTQEEHDLIALVINKGVRVVVSTFLALPSTKIIRRNNLGIPRWRGNGHLPTSLDIQRAATQALEGRD

SEQ ID NO: 10 - protein, 1134 aa, synthetic construct
  REGION 1..1134: note = Category: MG3 chimeric effectors
  REGION 1..1134: note = Description: MG3-6_3-4 chimera
MSTDMKNYRIGVDVGDRSVGLAAIEFDDDGLPIQKLALVTFRHDGGLDPTKNKTPMSRKETRGIARRTMRMNRERKRRLRNLDNVLENLGYSVPEGPEPETYEAWTSRALLASIKLASADELNEHLVRAVRHMARHRGWANPWWSLDQLEKASQEPSETFEIILARARELFGEKVPANPTLGMLGALAANNEVLLRPRDEKKRKTGYVRGTPLMFAQVRQGDQLAELRRICEVQGIEDQYEALRLGVFDHKHPYVPKERVGKDPLNPSTNRTIRASLEFQEFRILDSVANLRVRIGSRAKRELTEAEYDAAVEFLMDYADKEQPSWADVAEKIGVPGNRLVAPVLEDVQQKTAPYDRSSAAFEKAMGKKTEARQWWESTDDDQLRSLLIAFLVDATNDTEEAAAEAGLSELYKSWPAEEREALSNIDFEKGRVAYSQETLSKLSEYMHEYRVGLHEARKAVFGVDDTWRPPLDKLEEPTGQPAVDRVLTILRRFVLDCERQWGRPRAITVEHTRTGLMGPTQRQKILNEQKKNRADNERIRDELRESGVDNPSRAEVRRHLIVQEQECQCLYCGTMITTTTSELDHIVPRAGGGSSRRENLAAVCRACNAKKKRELFYAWAGPVKSQETIERVRQLKAFKDSKKAKMFKNQIRRLNQTEADEPIDERSLASTSYAAVAVRERLEQHFNEGLALDDKSRVVLDVYAGAVTRESRRAGGIDERILLRGERDKNRFDVRHHAVDAAVMTLLNRSVALTLEQRSQLRRAFYELELDKLDRDQLKPGEDWRNFTGLYEASQNKFSEWKKAATVLGDLLAEAIEDDAIAVVSPLRLRPQNGSVHDDTINAVKKLTLGSAWPADAVKRIVDPEIYLAMKDVLGKLKELPEDSARSLELSDGRYIEADDEVLFFPKKAASILTPRGAAEIGNSIHHARLYSWLTKKGELKFGMLRVYGAEFPWLMRESGSRDVLHMPIHPGSQSFRGMQDGVRKAVESGEAVEFGWITQDDELEFDPEDYIAHGGDDELNRLLRVMPERRWRVDGFYNAGTLRIRPALLSAEQLPSELQKKVADKTLSDVELILLRAVQRGLFVAISSFLPLESLKVIRRNNLGFPRWRGNGNLPTSFEVRSSALRALGVEG

SEQ ID NO: 11 - protein, 1123 aa, synthetic construct
  REGION 1..1123: note = Category: MG3 chimeric effectors
  REGION 1..1123: note = Description: MG3-6_3-7 chimera
MSTDMKNYRIGVDVGDRSVGLAAIEFDDDGLPIQKLALVTFRHDGGLDPTKNKTPMSRKETRGIARRTMRMNRERKRRLRNLDNVLENLGYSVPEGPEPETYEAWTSRALLASIKLASADELNEHLVRAVRHMARHRGWANPWWSLDQLEKASQEPSETFEIILARARELFGEKVPANPTLGMLGALAANNEVLLRPRDEKKRKTGYVRGTPLMFAQVRQGDQLAELRRICEVQGIEDQYEALRLGVFDHKHPYVPKERVGKDPLNPSTNRTIRASLEFQEFRILDSVANLRVRIGSRAKRELTEAEYDAAVEFLMDYADKEQPSWADVAEKIGVPGNRLVAPVLEDVQQKTAPYDRSSAAFEKAMGKKTEARQWWESTDDDQLRSLLIAFLVDATNDTEEAAAEAGLSELYKSWPAEEREALSNIDFEKGRVAYSQETLSKLSEYMHEYRVGLHEARKAVFGVDDTWRPPLDKLEEPTGQPAVDRVLTILRRFVLDCERQWGRPRAITVEHTRTGLMGPTQRQKILNEQKKNRADNERIRDELRESGVDNPSRAEVRRHLIVQEQECQCLYCGTMITTTTSELDHIVPRAGGGSSRRENLAAVCRACNAKKKRELFYAWAGPVKSQETIERVRQLKAFKDSKKAKMFKNQIRRLNQTEADEPIDERSLASTSYAAVAVRERLEQHFNEGLALDDKSRVVLDVYAGAVTRESRRAGGIDERILLRGERDKNRFDVRHHAVDAAVLTLLNRSVAVTLEQRRLIKQQREYSLEKSRRERDNVWRDFMGLGPAAQEKFAKWKKTAYVLADIIKEAISNDAIPVVSPLRLRPQNGSVHLDTVDAVLERTIGDAWTVDQVHRIVNPQIYLAFAGYLGNQKALDPDSSRVLALNDGRKLTAEDVIYVFPEKAASILTPRGVVKIGESVHHVRLYAWKNRKGKAEVGMLRVFGAEFPWLMRESGVKDVLRVPIHTGSQSYRDLSFTVRKNIEKGEAAEIGWLTQNEELEFNPESYLQEGGKDKLAKFLAFLPETRWRVDGFPMPDKLRIRPALLSREEIPEGVFRTEEQSLLEEALTKGLIIATKGLLSLPDVKVLRRNNLGIPRWRGGSYRPVSLDIQRAALAALDEQE

SEQ ID NO: 12 - protein, 1134 aa, synthetic construct
  REGION 1..1134: note = Category: MG3 chimeric effectors
  REGION 1..1134: note = Description: MG3-6_3-8 chimera
MSTDMKNYRIGVDVGDRSVGLAAIEFDDDGLPIQKLALVTFRHDGGLDPTKNKTPMSRKETRGIARRTMRMNRERKRRLRNLDNVLENLGYSVPEGPEPETYEAWTSRALLASIKLASADELNEHLVRAVRHMARHRGWANPWWSLDQLEKASQEPSETFEIILARARELFGEKVPANPTLGMLGALAANNEVLLRPRDEKKRKTGYVRGTPLMFAQVRQGDQLAELRRICEVQGIEDQYEALRLGVFDHKHPYVPKERVGKDPLNPSTNRTIRASLEFQEFRILDSVANLRVRIGSRAKRELTEAEYDAAVEFLMDYADKEQPSWADVAEKIGVPGNRLVAPVLEDVQQKTAPYDRSSAAFEKAMGKKTEARQWWESTDDDQLRSLLIAFLVDATNDTEEAAAEAGLSELYKSWPAEEREALSNIDFEKGRVAYSQETLSKLSEYMHEYRVGLHEARKAVFGVDDTWRPPLDKLEEPTGQPAVDRVLTILRRFVLDCERQWGRPRAITVEHTRTGLMGPTQRQKILNEQKKNRADNERIRDELRESGVDNPSRAEVRRHLIVQEQECQCLYCGTMITTTTSELDHIVPRAGGGSSRRENLAAVCRACNAKKKRELFYAWAGPVKSQETIERVRQLKAFKDSKKAKMFKNQIRRLNQTEADEPIDERSLASTSYAAVAVRERLEQHFNEGLALDDKSRVVLDVYAGAVTRESRRAGGIDERILLRGERDKNRFDVRHHAVDAAVMTLLNRSVALTLEQRSQLRRAFYEQGLDKLDRDQLKPEEDWRNFIGLSLASQEKFLEWKKVTTVLGDLLAEAIEDDSIAVVSPLRLRPQNGRVHKDTIAAVKKQTLGSAWSADAVKRIVDPEIYLAMKDALGKSKVLPEDSARTLELSDGRYLEADDEVLFFPKNAASILTPRGVAEIGGSIHHARLYSWLTKKGELKIGMLRVYGAEFPWLMRESGSHDVLRMPIHPGSQSFRDMQDTTRKAVESSEAVEFAWITQNDELEFEPEDYIAHGGKDELRQFLEFMPECRWRVDGFKKNYQIRIRPAMLSREQLPSDIQRRLESKTLTENESLLLKALDTGLVVAIGGLLPLGTLKVIRRNNLGFPRWRGNGNLPTSFEVRSSALRALGVEG

SEQ ID NO: 13 - protein, 1039 aa, synthetic construct
  REGION 1..1039: note = Category: MG3 chimeric effectors
  REGION 1..1039: note = Description: MG3-6_4-2 chimera
MSTDMKNYRIGVDVGDRSVGLAAIEFDDDGLPIQKLALVTFRHDGGLDPTKNKTPMSRKETRGIARRTMRMNRERKRRLRNLDNVLENLGYSVPEGPEPETYEAWTSRALLASIKLASADELNEHLVRAVRHMARHRGWANPWWSLDQLEKASQEPSETFEIILARARELFGEKVPANPTLGMLGALAANNEVLLRPRDEKKRKTGYVRGTPLMFAQVRQGDQLAELRRICEVQGIEDQYEALRLGVFDHKHPYVPKERVGKDPLNPSTNRTIRASLEFQEFRILDSVANLRVRIGSRAKRELTEAEYDAAVEFLMDYADKEQPSWADVAEKIGVPGNRLVAPVLEDVQQKTAPYDRSSAAFEKAMGKKTEARQWWESTDDDQLRSLLIAFLVDATNDTEEAAAEAGLSELYKSWPAEEREALSNIDFEKGRVAYSQETLSKLSEYMHEYRVGLHEARKAVFGVDDTWRPPLDKLEEPTGQPAVDRVLTILRRFVLDCERQWGRPRAITVEHTRTGLMGPTQRQKILNEQKKNRADNERIRDELRESGVDNPSRAEVRRHLIVQEQECQCLYCGTMITTTTSELDHIVPRAGGGSSRRENLAAVCRACNAKKKRELFYAWAGPVKSQETIERVRQLKAFKDSKKAKMFKNQIRRLNQTEADEPIDERSLASTSYAAVAVRERLEQHFNEGLALDDKSRVVLDVYAGAVTRESRRAGGIDERILLRGERDKNRFDVRHHAVDAVAIALTDPAALKSISQAASDERRGGRVSFGAVALPWVDFIGDVQAAIEAINVSHRPSRKVNGALHEETFYGPRGMDGDGRPTGYVQRKPVERLSAKEIPNIPDPAVREAVQAKLDEVGGTPAQAFKDPANHPVRKRGIPVHKVRLRLNINPVQVGSGATERHVLTGSNHHMEIIEVRDAKGGKKWTGRLVHRLEAKRRALGRETIVDRAVQAGRQFQFSLSPGDMIELTGEDGERKLHVVRSISEGRIEYVDARDARKKADIRASGDWRKPAVGSLLRLHCRKVVVTPFGEIRYAND

SEQ ID NO: 14 - protein, 1051 aa, synthetic construct
  REGION 1..1051: note = Category: MG3 chimeric effectors
  REGION 1..1051: note = Description: MG3-6_4-5 chimera
MSTDMKNYRIGVDVGDRSVGLAAIEFDDDGLPIQKLALVTFRHDGGLDPTKNKTPMSRKETRGIARRTMRMNRERKRRLRNLDNVLENLGYSVPEGPEPETYEAWTSRALLASIKLASADELNEHLVRAVRHMARHRGWANPWWSLDQLEKASQEPSETFEIILARARELFGEKVPANPTLGMLGALAANNEVLLRPRDEKKRKTGYVRGTPLMFAQVRQGDQLAELRRICEVQGIEDQYEALRLGVFDHKHPYVPKERVGKDPLNPSTNRTIRASLEFQEFRILDSVANLRVRIGSRAKRELTEAEYDAAVEFLMDYADKEQPSWADVAEKIGVPGNRLVAPVLEDVQQKTAPYDRSSAAFEKAMGKKTEARQWWESTDDDQLRSLLIAFLVDATNDTEEAAAEAGLSELYKSWPAEEREALSNIDFEKGRVAYSQETLSKLSEYMHEYRVGLHEARKAVFGVDDTWRPPLDKLEEPTGQPAVDRVLTILRRFVLDCERQWGRPRAITVEHTRTGLMGPTQRQKILNEQKKNRADNERIRDELRESGVDNPSRAEVRRHLIVQEQECQCLYCGTMITTTTSELDHIVPRAGGGSSRRENLAAVCRACNAKKKRELFYAWAGPVKSQETIERVRQLKAFKDSKKAKMFKNQIRRLNQTEADEPIDERSLASTSYAAVAVRERLEQHFNEGLALDDKSRVVLDVYAGAVTRESRRAGGIDERILLRGERDKNRFDVRHHAVDAVVIALTGPGTVQALTRAALRAKELGRRLFVPLDPPWADRDSFLRDVRASVEAITVSYRVDRKVSGQLHEESNYSKPHMTVDNKGNLVEHRHIRKPLKDMSVEEVEAIVDDRVRKLVQEKLRQLGQEPKKAFADEANHPYFTTADGRLVPIHKARIRKTVATITVGPPQCPRHVAPGLNHHIEILAVRDPAGAVTHWEGELVSLFEAARRVKAGEPVVRRNHGPNKDFLFSLAKGEYVEMELQPGKRQLFRVTVISAKQIEFRLHHDARPTMLLRKTPGARVIRSPGSLFKAKARKVAVDPLGNVFPAND

SEQ ID NO: 15 - protein, 1061 aa, synthetic construct
  REGION 1..1061: note = Category: MG3 chimeric effectors
  REGION 1..1061: note = Description: MG3-6_6-3 chimera
MSTDMKNYRIGVDVGDRSVGLAAIEFDDDGLPIQKLALVTFRHDGGLDPTKNKTPMSRKETRGIARRTMRMNRERKRRLRNLDNVLENLGYSVPEGPEPETYEAWTSRALLASIKLASADELNEHLVRAVRHMARHRGWANPWWSLDQLEKASQEPSETFEIILARARELFGEKVPANPTLGMLGALAANNEVLLRPRDEKKRKTGYVRGTPLMFAQVRQGDQLAELRRICEVQGIEDQYEALRLGVFDHKHPYVPKERVGKDPLNPSTNRTIRASLEFQEFRILDSVANLRVRIGSRAKRELTEAEYDAAVEFLMDYADKEQPSWADVAEKIGVPGNRLVAPVLEDVQQKTAPYDRSSAAFEKAMGKKTEARQWWESTDDDQLRSLLIAFLVDATNDTEEAAAEAGLSELYKSWPAEEREALSNIDFEKGRVAYSQETLSKLSEYMHEYRVGLHEARKAVFGVDDTWRPPLDKLEEPTGQPAVDRVLTILRRFVLDCERQWGRPRAITVEHTRTGLMGPTQRQKILNEQKKNRADNERIRDELRESGVDNPSRAEVRRHLIVQEQECQCLYCGTMITTTTSELDHIVPRAGGGSSRRENLAAVCRACNAKKKRELFYAWAGPVKSQETIERVRQLKAFKDSKKAKMFKNQIRRLNQTEADEPIDERSLASTSYAAVAVRERLEQHFNEGLALDDKSRVVLDVYAGAVTRESRRAGGIDERILLRGERDKNRFDVRHHAVDAIVVAFTNRSTLKRLSDENKRIGTAEWMDADESGRATNDEIKRRLGGRIDLSEPWPTFRNDVEVSINNITVSHRVNRKVSGALHEETYYGPTDEPAPKNKEMMVLRKSVHQLSKKDLGLIRDETIRQIVNDEVQKRMDNGESQANAIASLEADPPFIISPKAKVPIRKVRLLMKKDPQIMHYFENKNGEEDRAALYGNNHHIAIYETSDKNGVKKQIGIVIPMMEAARRVKDGDPIVMKDYRPDHTFLYSLAKNDMIFNHEDEQIYRVQKINSDGTIMFRQNNVAMKGQSDPGVYFKSGSRLGASKIKISPIGEIFPAND

SEQ ID NO: 16 - protein, 990 aa, synthetic construct
  REGION 1..990: note = Category: MG3 chimeric effectors
  REGION 1..990: note = Description: MG3-6_14-1 chimera
MSTDMKNYRIGVDVGDRSVGLAAIEFDDDGLPIQKLALVTFRHDGGLDPTKNKTPMSRKETRGIARRTMRMNRERKRRLRNLDNVLENLGYSVPEGPEPETYEAWTSRALLASIKLASADELNEHLVRAVRHMARHRGWANPWWSLDQLEKASQEPSETFEIILARARELFGEKVPANPTLGMLGALAANNEVLLRPRDEKKRKTGYVRGTPLMFAQVRQGDQLAELRRICEVQGIEDQYEALRLGVFDHKHPYVPKERVGKDPLNPSTNRTIRASLEFQEFRILDSVANLRVRIGSRAKRELTEAEYDAAVEFLMDYADKEQPSWADVAEKIGVPGNRLVAPVLEDVQQKTAPYDRSSAAFEKAMGKKTEARQWWESTDDDQLRSLLIAFLVDATNDTEEAAAEAGLSELYKSWPAEEREALSNIDFEKGRVAYSQETLSKLSEYMHEYRVGLHEARKAVFGVDDTWRPPLDKLEEPTGQPAVDRVLTILRRFVLDCERQWGRPRAITVEHTRTGLMGPTQRQKILNEQKKNRADNERIRDELRESGVDNPSRAEVRRHLIVQEQECQCLYCGTMITTTTSELDHIVPRAGGGSSRRENLAAVCRACNAKKKRELFYAWAGPVKSQETIERVRQLKAFKDSKKAKMFKNQIRRLNQTEADEPIDERSLASTSYAAVAVRERLEQHFNEGLALDDKSRVVLDVYAGAVTRESRRAGGIDERILLRGERDKNRFDVRHHAVDACVIAACSPSLVIKTARINQETHWSITRGMNETQRRDAIMKALESVMPWETFANEVRAAHDFVVPTRFVPRKGKGELFEQTVYRYAGVNAQGKDIARKASSDKDIVMGNAVVSADEKSVIKVSEMLCLRLWHDPEAKKGQGAWYADPVYKADIPALKDGTYVPRIAKAHTGRKAWKPVPESAMAKPPLEIYFGDLVQIGDFIGRFSGYNINNANWSFTDRLTRLNLSCPTVGQLNNDLSPVVIRESPIK

SEQ ID NO: 17 - protein, 1096 aa, synthetic construct
  REGION 1..1096: note = Category: MG3 chimeric effectors
  REGION 1..1096: note = Description: MG3-6_15-1 chimera
MSTDMKNYRIGVDVGDRSVGLAAIEFDDDGLPIQKLALVTFRHDGGLDPTKNKTPMSRKETRGIARRTMRMNRERKRRLRNLDNVLENLGYSVPEGPEPETYEAWTSRALLASIKLASADELNEHLVRAVRHMARHRGWANPWWSLDQLEKASQEPSETFEIILARARELFGEKVPANPTLGMLGALAANNEVLLRPRDEKKRKTGYVRGTPLMFAQVRQGDQLAELRRICEVQGIEDQYEALRLGVFDHKHPYVPKERVGKDPLNPSTNRTIRASLEFQEFRILDSVANLRVRIGSRAKRELTEAEYDAAVEFLMDYADKEQPSWADVAEKIGVPGNRLVAPVLEDVQQKTAPYDRSSAAFEKAMGKKTEARQWWESTDDDQLRSLLIAFLVDATNDTEEAAAEAGLSELYKSWPAEEREALSNIDFEKGRVAYSQETLSKLSEYMHEYRVGLHEARKAVFGVDDTWRPPLDKLEEPTGQPAVDRVLTILRRFVLDCERQWGRPRAITVEHTRTGLMGPTQRQKILNEQKKNRADNERIRDELRESGVDNPSRAEVRRHLIVQEQECQCLYCGTMITTTTSELDHIVPRAGGGSSRRENLAAVCRACNAKKKRELFYAWAGPVKSQETIERVRQLKAFKDSKKAKMFKNQIRRLNQTEADEPIDERSLASTSYAAVAVRERLEQHFNEGLALDDKSRVVLDVYAGAVTRESRRAGGIDERILLRGERDKNRFDVRHHAVDAVIIACATQGIVNKVSRYSKSRELWDYEVDMETGEVLQKKNKNTKDVFPEPWLNFRYELEQKVRVRPLDIPETADITEMEEPFVSHMPNRKIHGPAHKETIRSGRLKEEGYTISKTALIDLKLTEDKEEIKGYYNKESDRLLYEALKKQLQRYGGKAKEAFKEPFHKPKADGTPGPIVNKVKIMEKSTMLIPVNGGKGLASNGNMVRIDVFRAEEKGKKKYYFIPVYVADTVKEELPNRAVLAHKPYEAWKIMKEENFIFSLYPNDLIFVDAGKEIPFKAALKGSTLDPEKKASRFLMYYKGADIATGSISGVNHDETYKARGVGIQSLREIKKCCIDVLGNISFASKEKRQTFR

SEQ ID NO: 18 - protein, 1110 aa, synthetic construct
  REGION 1..1110: note = Category: MG3 chimeric effectors
  REGION 1..1110: note = Description: MG3-6_16-1 chimera
MSTDMKNYRIGVDVGDRSVGLAAIEFDDDGLPIQKLALVTFRHDGGLDPTKNKTPMSRKETRGIARRTMRMNRERKRRLRNLDNVLENLGYSVPEGPEPETYEAWTSRALLASIKLASADELNEHLVRAVRHMARHRGWANPWWSLDQLEKASQEPSETFEIILARARELFGEKVPANPTLGMLGALAANNEVLLRPRDEKKRKTGYVRGTPLMFAQVRQGDQLAELRRICEVQGIEDQYEALRLGVFDHKHPYVPKERVGKDPLNPSTNRTIRASLEFQEFRILDSVANLRVRIGSRAKRELTEAEYDAAVEFLMDYADKEQPSWADVAEKIGVPGNRLVAPVLEDVQQKTAPYDRSSAAFEKAMGKKTEARQWWESTDDDQLRSLLIAFLVDATNDTEEAAAEAGLSELYKSWPAEEREALSNIDFEKGRVAYSQETLSKLSEYMHEYRVGLHEARKAVFGVDDTWRPPLDKLEEPTGQPAVDRVLTILRRFVLDCERQWGRPRAITVEHTRTGLMGPTQRQKILNEQKKNRADNERIRDELRESGVDNPSRAEVRRHLIVQEQECQCLYCGTMITTTTSELDHIVPRAGGGSSRRENLAAVCRACNAKKKRELFYAWAGPVKSQETIERVRQLKAFKDSKKAKMFKNQIRRLNQTEADEPIDERSLASTSYAAVAVRERLEQHFNEGLALDDKSRVVLDVYAGAVTRESRRAGGIDERILLRGERDKNRFDVRHHAVDALTVALTRQSYIQRLNTLEASHEHMEKLVKEANTPYKEKKSLLEKWVALQPHFSVEEVTTQVDGILVSFRAGKRVTTPARRAVYHGGKRTIVQRGIQVPRGALTEDTIYGKLGDKFVVKYALDHPSMKPENIVDPTIRLLVENRITALGKKDAFKTPLYSAEGMEIKSVRCYTSLSEKGVVPIKYNEKGNAIGFAKKGNNHHVAIYKDQSGQYQEMVVSFWDAVERKLYGVPTVITNPKTVWDELLEKELPQDFLEKLPKDNWQYVLSMQENEMFVLGMEEDEFNDAIDTQDYNTLNKHLYRVQKLSHADYTFRFHTETKVDDKYDGVENGRNTSMSLKALVRIRSFNGLFTQFPHKVKIDIMGRITKA

SEQ ID NO: 19 - protein, 1174 aa, synthetic construct
  REGION 1..1174: note = Category: MG3 chimeric effectors
  REGION 1..1174: note = Description: MG3-6_16-2 chimera
MSTDMKNYRIGVDVGDRSVGLAAIEFDDDGLPIQKLALVTFRHDGGLDPTKNKTPMSRKETRGIARRTMRMNRERKRRLRNLDNVLENLGYSVPEGPEPETYEAWTSRALLASIKLASADELNEHLVRAVRHMARHRGWANPWWSLDQLEKASQEPSETFEIILARARELFGEKVPANPTLGMLGALAANNEVLLRPRDEKKRKTGYVRGTPLMFAQVRQGDQLAELRRICEVQGIEDQYEALRLGVFDHKHPYVPKERVGKDPLNPSTNRTIRASLEFQEFRILDSVANLRVRIGSRAKRELTEAEYDAAVEFLMDYADKEQPSWADVAEKIGVPGNRLVAPVLEDVQQKTAPYDRSSAAFEKAMGKKTEARQWWESTDDDQLRSLLIAFLVDATNDTEEAAAEAGLSELYKSWPAEEREALSNIDFEKGRVAYSQETLSKLSEYMHEYRVGLHEARKAVFGVDDTWRPPLDKLEEPTGQPAVDRVLTILRRFVLDCERQWGRPRAITVEHTRTGLMGPTQRQKILNEQKKNRADNERIRDELRESGVDNPSRAEVRRHLIVQEQECQCLYCGTMITTTTSELDHIVPRAGGGSSRRENLAAVCRACNAKKKRELFYAWAGPVKSQETIERVRQLKAFKDSKKAKMFKNQIRRLNQTEADEPIDERSLASTSYAAVAVRERLEQHFNEGLALDDKSRVVLDVYAGAVTRESRRAGGIDERILLRGERDKNRFDVRHHAVDALVVACTKQSYIQRLNNLNTERDAMYQDIEAQSVEWKEKHSLLEKWIKLQPHPTVSEVTDKVDEILVSFKAGKRVATLGKRSVYKNGKKTVVQNNIIVPRGALCEESVYGQINLIEKNKPIKYLFENPSLIFKPYIKALVEERLKEYNGDTSKAISSLKNNPIYLRKDKSVVLEYGTCYKKEYVKKYSLNSIKAKDVDSIIDKHIREVVRQRLEDNNNNEKAAFASPLYADKQKQIPIKSVRCTTGINIAAPVNYNESNDPISFVKPGNNHHIAIYKDKDGKRQEHIVTFWHAVERKKYGMPVVITNPKEIWDLIIEKSLDLPESFLNCLPNSDWNYEISMQQNEMFVMGMSEDEFQDAIRNNDYKTLNKYLYRVQSVSESDYWLRLHIETMNDKTPEGNIIKKYYRIKSINTFFNFNPHKVKITLLGEIQSS

SEQ ID NO: 20 - protein, 1094 aa, synthetic construct
  REGION 1..1094: note = Category: MG3 chimeric effectors
  REGION 1..1094: note = Description: MG3-6_18-1 chimera
MSTDMKNYRIGVDVGDRSVGLAAIEFDDDGLPIQKLALVTFRHDGGLDPTKNKTPMSRKETRGIARRTMRMNRERKRRLRNLDNVLENLGYSVPEGPEPETYEAWTSRALLASIKLASADELNEHLVRAVRHMARHRGWANPWWSLDQLEKASQEPSETFEIILARARELFGEKVPANPTLGMLGALAANNEVLLRPRDEKKRKTGYVRGTPLMFAQVRQGDQLAELRRICEVQGIEDQYEALRLGVFDHKHPYVPKERVGKDPLNPSTNRTIRASLEFQEFRILDSVANLRVRIGSRAKRELTEAEYDAAVEFLMDYADKEQPSWADVAEKIGVPGNRLVAPVLEDVQQKTAPYDRSSAAFEKAMGKKTEARQWWESTDDDQLRSLLIAFLVDATNDTEEAAAEAGLSELYKSWPAEEREALSNIDFEKGRVAYSQETLSKLSEYMHEYRVGLHEARKAVFGVDDTWRPPLDKLEEPTGQPAVDRVLTILRRFVLDCERQWGRPRAITVEHTRTGLMGPTQRQKILNEQKKNRADNERIRDELRESGVDNPSRAEVRRHLIVQEQECQCLYCGTMITTTTSELDHIVPRAGGGSSRRENLAAVCRACNAKKKRELFYAWAGPVKSQETIERVRQLKAFKDSKKAKMFKNQIRRLNQTEADEPIDERSLASTSYAAVAVRERLEQHFNEGLALDDKSRVVLDVYAGAVTRESRRAGGIDERILLRGERDKNRFDVRHHAVDAYLNAVVGNVYHEKFTKNPLRFVRSGQEYSLNLSALFQNWNIYKGGRVIWQKGEDGSLETVRARMAKNDPMVTRYCTEGRGALYDLQPMKKSKGQLPLKSSDERLQHIDRYGGYNKLAGAYFTLAAYYKKGKRVKSIESVPLYLAAKLQRDPAALQQYLADQLGTDRVEILVPEIKLGTLFKWNGYPMTLSGRTGPQLLFRNAAELRTNAEQEQYIKKMSRYLEKCKGRKEPLPIRPAYDKLTPEENLQLYDAFTQWLTSGIYAKRLSLQGKFLLEKRDAFAALSPEAQVRQLMEILHLFQCNPVAANLSELGGAAHAGILLASKNIDGKVPVSIVHQSVTGYFTQEVCLNDL

SEQ ID NO: 21 - protein, 1101 aa, synthetic construct
  REGION 1..1101: note = Category: MG3 chimeric effectors
  REGION 1..1101: note = Description: MG3-6_21-1 chimera
MSTDMKNYRIGVDVGDRSVGLAAIEFDDDGLPIQKLALVTFRHDGGLDPTKNKTPMSRKETRGIARRTMRMNRERKRRLRNLDNVLENLGYSVPEGPEPETYEAWTSRALLASIKLASADELNEHLVRAVRHMARHRGWANPWWSLDQLEKASQEPSETFEIILARARELFGEKVPANPTLGMLGALAANNEVLLRPRDEKKRKTGYVRGTPLMFAQVRQGDQLAELRRICEVQGIEDQYEALRLGVFDHKHPYVPKERVGKDPLNPSTNRTIRASLEFQEFRILDSVANLRVRIGSRAKRELTEAEYDAAVEFLMDYADKEQPSWADVAEKIGVPGNRLVAPVLEDVQQKTAPYDRSSAAFEKAMGKKTEARQWWESTDDDQLRSLLIAFLVDATNDTEEAAAEAGLSELYKSWPAEEREALSNIDFEKGRVAYSQETLSKLSEYMHEYRVGLHEARKAVFGVDDTWRPPLDKLEEPTGQPAVDRVLTILRRFVLDCERQWGRPRAITVEHTRTGLMGPTQRQKILNEQKKNRADNERIRDELRESGVDNPSRAEVRRHLIVQEQECQCLYCGTMITTTTSELDHIVPRAGGGSSRRENLAAVCRACNAKKKRELFYAWAGPVKSQETIERVRQLKAFKDSKKAKMFKNQIRRLNQTEADEPIDERSLASTSYAAVAVRERLEQHFNEGLALDDKSRVVLDVYAGAVTRESRRAGGIDERILLRGERDKNRFDVRHHAVDAAVIACITPGMIQKITKYAQNHERFYATAKGYVDIETGEVLTRSEYEAMDDIRFPEPWPGFRSELEARVSEHPQEAIARLKLPHYENSEEIRPIFVSRMPNHKVTGAAHLETIRSKKGGAGSTVTKTALPDLKLDKNGEIAGYYRKEDDPLLYEALKARLKAFGGDGKKAFAEPFHKPKHNGEPGPIVKKVKIQESATLTVPVNHGIAANGSMVRLDVFHVDGDGYYFVPIYTSDTVKPELPNRAVVAGRRVQEWKVMDDSYFKFSLYPKDLIRIRSKKGIKLKAVNRNADLQEYSTNDCLCYFVKFNISTGALSVENHDRKFEQPGLGGKTLLSIEKYQVDVLGNYSPVALPEKRMKFR

SEQ ID NO: 22 - protein, 1172 aa, synthetic construct
  REGION 1..1172: note = Category: MG3 chimeric effectors
  REGION 1..1172: note = Description: MG3-6_22-2 chimera
MSTDMKNYRIGVDVGDRSVGLAAIEFDDDGLPIQKLALVTFRHDGGLDPTKNKTPMSRKETRGIARRTMRMNRERKRRLRNLDNVLENLGYSVPEGPEPETYEAWTSRALLASIKLASADELNEHLVRAVRHMARHRGWANPWWSLDQLEKASQEPSETFEIILARARELFGEKVPANPTLGMLGALAANNEVLLRPRDEKKRKTGYVRGTPLMFAQVRQGDQLAELRRICEVQGIEDQYEALRLGVFDHKHPYVPKERVGKDPLNPSTNRTIRASLEFQEFRILDSVANLRVRIGSRAKRELTEAEYDAAVEFLMDYADKEQPSWADVAEKIGVPGNRLVAPVLEDVQQKTAPYDRSSAAFEKAMGKKTEARQWWESTDDDQLRSLLIAFLVDATNDTEEAAAEAGLSELYKSWPAEEREALSNIDFEKGRVAYSQETLSKLSEYMHEYRVGLHEARKAVFGVDDTWRPPLDKLEEPTGQPAVDRVLTILRRFVLDCERQWGRPRAITVEHTRTGLMGPTQRQKILNEQKKNRADNERIRDELRESGVDNPSRAEVRRHLIVQEQECQCLYCGTMITTTTSELDHIVPRAGGGSSRRENLAAVCRACNAKKKRELFYAWAGPVKSQETIERVRQLKAFKDSKKAKMFKNQIRRLNQTEADEPIDERSLASTSYAAVAVRERLEQHFNEGLALDDKSRVVLDVYAGAVTRESRRAGGIDERILLRGERDKNRFDVRHHAVDAIAIACINRSIVNYLNNAAANQTEREDLRRAVCIPERNGQTKRQLRSPWHCFARDAENALRQIVVSFKQNLRVATKATNSYECFDTASGKKIRKHQSNREHYAIRKPLHKDSVYGEVILTSIASVNLKKALLKAERILDKRLKEKIFELRKLYNYSNKQIEEHLTKVCINCPEWKNYDFKKIAVRILSNDADATHIVAIRKPLDESFDEVKINTITDTGIQKILLNHLSRYADDPKKAFSPEGIEDMNANIASLNGGKQHLPIYKVRVSEKDNGGYFPIGQKGNRPKKYVTTAKDTNLFFAVYADSKGKRSYKTIDLRTAIECRKQGLSVAPSINEKGDKLLFTLSPNDLVYMPSEGEEANGFAIDNNLNKDQIYKMVSANNKQCFFIPHTVADFISRGEEYNSHNKIELTEDRRSIKEHCVPLKVNRLGK

SEQ ID NO: 23 - protein, 1112 aa, synthetic construct
  REGION 1..1112: note = Category: MG3 chimeric effectors
  REGION 1..1112: note = Description: MG3-6_23-1 chimera
MSTDMKNYRIGVDVGDRSVGLAAIEFDDDGLPIQKLALVTFRHDGGLDPTKNKTPMSRKETRGIARRTMRMNRERKRRLRNLDNVLENLGYSVPEGPEPETYEAWTSRALLASIKLASADELNEHLVRAVRHMARHRGWANPWWSLDQLEKASQEPSETFEIILARARELFGEKVPANPTLGMLGALAANNEVLLRPRDEKKRKTGYVRGTPLMFAQVRQGDQLAELRRICEVQGIEDQYEALRLGVFDHKHPYVPKERVGKDPLNPSTNRTIRASLEFQEFRILDSVANLRVRIGSRAKRELTEAEYDAAVEFLMDYADKEQPSWADVAEKIGVPGNRLVAPVLEDVQQKTAPYDRSSAAFEKAMGKKTEARQWWESTDDDQLRSLLIAFLVDATNDTEEAAAEAGLSELYKSWPAEEREALSNIDFEKGRVAYSQETLSKLSEYMHEYRVGLHEARKAVFGVDDTWRPPLDKLEEPTGQPAVDRVLTILRRFVLDCERQWGRPRAITVEHTRTGLMGPTQRQKILNEQKKNRADNERIRDELRESGVDNPSRAEVRRHLIVQEQECQCLYCGTMITTTTSELDHIVPRAGGGSSRRENLAAVCRACNAKKKRELFYAWAGPVKSQETIERVRQLKAFKDSKKAKMFKNQIRRLNQTEADEPIDERSLASTSYAAVAVRERLEQHFNEGLALDDKSRVVLDVYAGAVTRESRRAGGIDERILLRGERDKNRFDVRHHAVDAYLNIVVGNTYSTKFTNNPLNFIKAGAKRPQDNQFKYNMDKIFDYNVISRGERAWIAGSDGSICTVKKFMSRNTVLITRKAKEVHGALSNKATIWGKNVAKPGAYLPVKSTDLKAQDVTKYGGITSIANSGYTLAEYKVNGKTTRSLEALPVYLGRAEQLTEKTVVDYLSSSLQESSKKKIEDIQVRKLFIPQGSKVKIDGFCYYLGGKTGDSIYLNNAVPLYLSSTSEEYLRKLLKAVENNNYNERDKNGQIILTAPKNVQLLSSIFDKLRSKPFSNNKWNIYFSIVNGKETKVEQLFSKLSIDKQAEVISQIVIWINSSRQNVNLSLIGGSAHSGTQALSKTVSRLNECMLISQSITGIYEHSVDLLTI

SEQ ID NO: 24 - protein, 1090 aa, synthetic construct
  REGION 1..1090: note = Category: MG3 chimeric effectors
  REGION 1..1090: note = Description: MG3-6_SaCas9 chimera
MSTDMKNYRIGVDVGDRSVGLAAIEFDDDGLPIQKLALVTFRHDGGLDPTKNKTPMSRKETRGIARRTMRMNRERKRRLRNLDNVLENLGYSVPEGPEPETYEAWTSRALLASIKLASADELNEHLVRAVRHMARHRGWANPWWSLDQLEKASQEPSETFEIILARARELFGEKVPANPTLGMLGALAANNEVLLRPRDEKKRKTGYVRGTPLMFAQVRQGDQLAELRRICEVQGIEDQYEALRLGVFDHKHPYVPKERVGKDPLNPSTNRTIRASLEFQEFRILDSVANLRVRIGSRAKRELTEAEYDAAVEFLMDYADKEQPSWADVAEKIGVPGNRLVAPVLEDVQQKTAPYDRSSAAFEKAMGKKTEARQWWESTDDDQLRSLLIAFLVDATNDTEEAAAEAGLSELYKSWPAEEREALSNIDFEKGRVAYSQETLSKLSEYMHEYRVGLHEARKAVFGVDDTWRPPLDKLEEPTGQPAVDRVLTILRRFVLDCERQWGRPRAITVEHTRTGLMGPTQRQKILNEQKKNRADNERIRDELRESGVDNPSRAEVRRHLIVQEQECQCLYCGTMITTTTSELDHIVPRAGGGSSRRENLAAVCRACNAKKKRELFYAWAGPVKSQETIERVRQLKAFKDSKKAKMFKNQIRRLNQTEADEPIDERSLASTSYAAVAVRERLEQHFNEGLALDDKSRVVLDVYAGAVTRESRRAGGIDERILLRGERDKNRFDVRHHAVDALIIANADFIFKEWKKLDKAKKVMENQMFEEKQAESMPEIETEQEYKEIFITPHQIKHIKDFKDYKYSHRVDKKPNRELINDTLYSTRKDDKGNTLIVNNLNGLYDKDNDKLKKLINKSPEKLLMYHHDPQTYQKLKLIMEQYGDEKNPLYKYYEETGNYLTKYSKKDNGPVIKKIKYYGNKLNAHLDITDDYPNSRNKVVKLSLKPYRFDVYLDNGVYKFVTVKNLDVIKKENYYEVNSKCYEEAKKLKKISNQAEFIASFYNNDLIKINGELYRVIGVNNDLLNRIEVNMIDITYREYLENMNDKRPPRIIKTIASKTQSIKKYSTDILGNLYEVKSKKHPQIIKKG

SEQ ID NO: 25 - protein, 1123 aa, synthetic construct
  REGION 1..1123: note = Category: MG3 chimeric effectors
  REGION 1..1123: note = Description: MG3-6_SpCas9 chimera
MSTDMKNYRIGVDVGDRSVGLAAIEFDDDGLPIQKLALVTFRHDGGLDPTKNKTPMSRKETRGIARRTMRMNRERKRRLRNLDNVLENLGYSVPEGPEPETYEAWTSRALLASIKLASADELNEHLVRAVRHMARHRGWANPWWSLDQLEKASQEPSETFEIILARARELFGEKVPANPTLGMLGALAANNEVLLRPRDEKKRKTGYVRGTPLMFAQVRQGDQLAELRRICEVQGIEDQYEALRLGVFDHKHPYVPKERVGKDPLNPSTNRTIRASLEFQEFRILDSVANLRVRIGSRAKRELTEAEYDAAVEFLMDYADKEQPSWADVAEKIGVPGNRLVAPVLEDVQQKTAPYDRSSAAFEKAMGKKTEARQWWESTDDDQLRSLLIAFLVDATNDTEEAAAEAGLSELYKSWPAEEREALSNIDFEKGRVAYSQETLSKLSEYMHEYRVGLHEARKAVFGVDDTWRPPLDKLEEPTGQPAVDRVLTILRRFVLDCERQWGRPRAITVEHTRTGLMGPTQRQKILNEQKKNRADNERIRDELRESGVDNPSRAEVRRHLIVQEQECQCLYCGTMITTTTSELDHIVPRAGGGSSRRENLAAVCRACNAKKKRELFYAWAGPVKSQETIERVRQLKAFKDSKKAKMFKNQIRRLNQTEADEPIDERSLASTSYAAVAVRERLEQHFNEGLALDDKSRVVLDVYAGAVTRESRRAGGIDERILLRGERDKNRFDVRHHAVDAYLNAVVGTALIKKYPKLESEFVYGDYKVYDVRKMIAKSEQEIGKATAKYFFYSNIMNFFKTEITLANGEIRKRPLIETNGETGEIVWDKGRDFATVRKVLSMPQVNIVKKTEVQTGGFSKESILPKRNSDKLIARKKDWDPKKYGGFDSPTVAYSVLVVAKVEKGKSKKLKSVKELLGITIMERSSFEKNPIDFLEAKGYKEVKKDLIIKLPKYSLFELENGRKRMLASAGELQKGNELALPSKYVNFLYLASHYEKLKGSPEDNEQKQLFVEQHKHYLDEIIEQISEFSKRVILADANLDKVLSAYNKHRDKPIREQAENIIHLFTLTNLGAPAAFKYFDTTIDRKRYTSTKEVLDATLIHQSITGLYETRIDLSQLGGD

SEQ ID NO: 26 - protein, 1105 aa, synthetic construct
  REGION 1..1105: note = Category: MG3 chimeric effectors
  REGION 1..1105: note = Description: MG3-6_15-1-WP chimera
MSTDMKNYRIGVDVGDRSVGLAAIEFDDDGLPIQKLALVTFRHDGGLDPTKNKTPMSRKETRGIARRTMRMNRERKRRLRNLDNVLENLGYSVPEGPEPETYEAWTSRALLASIKLASADELNEHLVRAVRHMARHRGWANPWWSLDQLEKASQEPSETFEIILARARELFGEKVPANPTLGMLGALAANNEVLLRPRDEKKRKTGYVRGTPLMFAQVRQGDQLAELRRICEVQGIEDQYEALRLGVFDHKHPYVPKERVGKDPLNPSTNRTIRASLEFQEFRILDSVANLRVRIGSRAKRELTEAEYDAAVEFLMDYADKEQPSWADVAEKIGVPGNRLVAPVLEDVQQKTAPYDRSSAAFEKAMGKKTEARQWWESTDDDQLRSLLIAFLVDATNDTEEAAAEAGLSELYKSWPAEEREALSNIDFEKGRVAYSQETLSKLSEYMHEYRVGLHEARKAVFGVDDTWRPPLDKLEEPTGQPAVDRVLTILRRFVLDCERQWGRPRAITVEHTRTGLMGPTQRQKILNEQKKNRADNERIRDELRESGVDNPSRAEVRRHLIVQEQECQCLYCGTMITTTTSELDHIVPRAGGGSSRRENLAAVCRACNAKKKRELFYAWAGPVKSQETIERVRQLKAFKDSKKAKMFKNQIRRLNQTEADEPIDERSLASTSYAAVAVRERLEQHFNEGLALDDKSRVVLDVYAGAVTRESRRAGGIDERILLRGERDKNRFDVRHHAVDAAVMTLLNRSVALTLEQRSQLRRTFYEQGLDKLDRNQLKPEEDWRDFTGLAPASQEKFLEWRKAATILGDLLAEAIEDDSIAVVSPLRLRPQNGSVHLEKIHGPAHKETIRSGRLKEEGYTISKTALIDLKLTEDKEEIKGYYNKESDRLLYEALKKQLQRYGGKAKEAFKEPFHKPKADGTPGPIVNKVKIMEKSTMLIPVNGGKGLASNGNMVRIDVFRAEEKGKKKYYFIPVYVADTVKEELPNRAVLAHKPYEAWKIMKEENFIFSLYPNDLIFVDAGKEIPFKAALKGSTLDPEKKASRFLMYYKGADIATGSISGVNHDETYKARGVGIQSLREIKKCCIDVLGNISFASKEKRQTFR

SEQ ID NO: 27 - protein, 1074 aa, synthetic construct
  REGION 1..1074: note = Category: MG3 chimeric effectors
  REGION 1..1074: note = Description: MG3-6_15-1-P chimera
MSTDMKNYRIGVDVGDRSVGLAAIEFDDDGLPIQKLALVTFRHDGGLDPTKNKTPMSRKETRGIARRTMRMNRERKRRLRNLDNVLENLGYSVPEGPEPETYEAWTSRALLASIKLASADELNEHLVRAVRHMARHRGWANPWWSLDQLEKASQEPSETFEIILARARELFGEKVPANPTLGMLGALAANNEVLLRPRDEKKRKTGYVRGTPLMFAQVRQGDQLAELRRICEVQGIEDQYEALRLGVFDHKHPYVPKERVGKDPLNPSTNRTIRASLEFQEFRILDSVANLRVRIGSRAKRELTEAEYDAAVEFLMDYADKEQPSWADVAEKIGVPGNRLVAPVLEDVQQKTAPYDRSSAAFEKAMGKKTEARQWWESTDDDQLRSLLIAFLVDATNDTEEAAAEAGLSELYKSWPAEEREALSNIDFEKGRVAYSQETLSKLSEYMHEYRVGLHEARKAVFGVDDTWRPPLDKLEEPTGQPAVDRVLTILRRFVLDCERQWGRPRAITVEHTRTGLMGPTQRQKILNEQKKNRADNERIRDELRESGVDNPSRAEVRRHLIVQEQECQCLYCGTMITTTTSELDHIVPRAGGGSSRRENLAAVCRACNAKKKRELFYAWAGPVKSQETIERVRQLKAFKDSKKAKMFKNQIRRLNQTEADEPIDERSLASTSYAAVAVRERLEQHFNEGLALDDKSRVVLDVYAGAVTRESRRAGGIDERILLRGERDKNRFDVRHHAVDAAVMTLLNRSVALTLEQRSQLRRTFYEQGLDKLDRNQLKPEEDWRDFTGLAPASQEKFLEWRKAATILGDLLAEAIEDDSIAVVSPLRLRPQNGSVHLETISAVKKQTLGSDWPADAVKRIVDPEIYLAMKDALGKLKELPEDSARSLELPDGRFVEADDEVLFFPENAASILTPRGVAEINMVRIDVFRAEEKGKKKYYFIPVYVADTVKEELPNRAVLAHKPYEAWKIMKEENFIFSLYPNDLIFVDAGKEIPFKAALKGSTLDPEKKASRFLMYYKGADIATGSISGVNHDETYKARGVGIQSLREIKKCCIDVLGNISFASKEKRQTFR

SEQ ID NO: 28 - RNA, 121 nt, synthetic construct
  source 1..121: mol_type = other RNA
  misc_feature 1..121: note = Category: MG1 sgRNA
  misc_feature 1..121: note = Description: MG1-4 sgRNA
nnnnnnnnnnnnnnnnnnnnnngttttgatttactcgaaagagtccaatcataattgaccggagaataattgattcctctacaatgtacgaataaattcattctctaaaccttaaaaattt

SEQ ID NO: 29 - RNA, 99 nt, synthetic construct
  source 1..99: mol_type = other RNA
  misc_feature 1..99: note = Category: MG1 sgRNA
  misc_feature 1..99: note = Description: MG1-5 sgRNA
nnnnnnnnnnnnnnnnnnnnnngttttgacttgaaaaagtcttaactgattttgccgaattttaagctctacgtagtaccttggaattcggcatatttt

SEQ ID NO: 30 - RNA, 99 nt, synthetic construct
  source 1..99: mol_type = other RNA
  misc_feature 1..99: note = Category: MG1 sgRNA
  misc_feature 1..99: note = Description: MG1-6 sgRNA
nnnnnnnnnnnnnnnnnnnnnngttttgacttgaaaaagtcttaactgattttgccgaatttcaagctctgcattgcaccttggcattcggcatatttt

SEQ ID NO: 31 - RNA, 99 nt, synthetic construct
  source 1..99: mol_type = other RNA
  misc_feature 1..99: note = Category: MG1 sgRNA
  misc_feature 1..99: note = Description: MG1-7 sgRNA
nnnnnnnnnnnnnnnnnnnnnngttttgactttgaaaaaagtcttaactgattttgccgaattttaagctctgcatggcaccttgaaattcggcatttt

SEQ ID NO: 32 - RNA, 100 nt, synthetic construct
  source 1..100: mol_type = other RNA
  misc_feature 1..100: note = Category: MG2 sgRNA
  misc_feature 1..100: note = Description: MG2-7 sgRNA
nnnnnnnnnnnnnnnnnnnnnngctttgccttggaaacaagacaaagttaattaaggcagttcggacctctactttgtacgtcaggatagaaagcctttt

SEQ ID NO: 33 - RNA, 115 nt, synthetic construct
  source 1..115: mol_type = other RNA
  misc_feature 1..115: note = Category: MG3 sgRNA
  misc_feature 1..115: note = Description: MG3-3 sgRNA
nnnnnnnnnnnnnnnnnnnnnngttgggaatcttgaaaaagattcccaataaggcacatttttagtgctgacttctcaccgtccagggttcattgaacaatgggcggtatgtttt

SEQ ID NO: 34 - RNA, 126 nt, synthetic construct
  source 1..126: mol_type = other RNA
  misc_feature 1..126: note = Category: MG3 sgRNA
  misc_feature 1..126: note = Description: MG3-4 sgRNA
nnnnnnnnnnnnnnnnnnnnnngttgagaatctttcattagaaataacgaaagattcttaataaggcgtccttccgatgctgacttctcaccgtccgttttccaataggagcgggcggtatgtttt

SEQ ID NO: 35 - RNA, 110 nt, synthetic construct
  source 1..110: mol_type = other RNA
  misc_feature 1..110: note = Category: MG3 sgRNA
  misc_feature 1..110: note = Description: MG3-6 sgRNA
nnnnnnnnnnnnnnnnnnnnnngttgagaatcgaaagattcttaataaggcatccttccgatgctgacttctcaccgtccgttttccaataggagcgggcggtatgtttt

SEQ ID NO: 36 - RNA, 110 nt, synthetic construct
  source 1..110: mol_type = other RNA
  misc_feature 1..110: note = Category: MG3 sgRNA
  misc_feature 1..110: note = Description: MG3-7 sgRNA
nnnnnnnnnnnnnnnnnnnnnngttgggaaccgaaaggttcccaataaggcgcatcttggcgctgacttctcaccgtcctcttgctgcttagcagagggcggtatgtttt

SEQ ID NO: 37 - RNA, 110 nt, synthetic construct
  source 1..110: mol_type = other RNA
  misc_feature 1..110: note = Category: MG3 sgRNA
  misc_feature 1..110: note = Description: MG3-8 sgRNA
nnnnnnnnnnnnnnnnnnnnnngttgagaatcgaaagattcttaataaggcatccttccgatgctgacttctcaccgtccggctcctcttaggaacgggcggtatgtttt

SEQ ID NO: 38 - RNA, 124 nt, synthetic construct
  source 1..124: mol_type = other RNA
  misc_feature 1..124: note = Category: MG4 sgRNA
  misc_feature 1..124: note = Description: MG4-5 sgRNA
nnnnnnnnnnnnnnnnnnnnnngctgtggcttgcgggggaaaccccttgtcacagtaagggactttcgttcgcgaaaggcaacctcgccagcatcgctgggcgaggaccagggcaaggcgattt

SEQ ID NO: 39 - RNA, 118 nt, synthetic construct
  source 1..118: mol_type = other RNA
  misc_feature 1..118: note = Category: MG14 sgRNA
  misc_feature 1..118: note = Description: MG14-1 sgRNA
nnnnnnnnnnnnnnnnnnnnnngtcttgagcgaaagctccagacaaggggagccacttaagtggcttacccgtaaagtaacccccgttcaatcttcggattgggcggggcgaactttt

SEQ ID NO: 40 - RNA, 118 nt, synthetic construct
  source 1..118: mol_type = other RNA
  misc_feature 1..118: note = Category: MG15 sgRNA
  misc_feature 1..118: note = Description: MG15-1 sgRNA
nnnnnnnnnnnnnnnnnnnnnngttgtaattccctagaaataggttattacaataaggtccaacaggagtgttggtaccgtaaagctctaacggcacccacgggtgccgttatctttt

SEQ ID NO: 41 - RNA, 162 nt, synthetic construct
  source 1..162: mol_type = other RNA
  misc_feature 1..162: note = Category: MG16 sgRNA
  misc_feature 1..162: note = Description: MG16-2 sgRNA
nnnnnnnnnnnnnnnnnnnnnngttgtgaattgctttaaattgaaaaatttaagcaattcacaataaggattattccgttgtgaaaacatttaaagcggggtcaacagcctcgctttctttttgagtctatgagacattaggtcaataagtctatgagtttt

SEQ ID NO: 42 - RNA, 101 nt, synthetic construct
  source 1..101: mol_type = other RNA
  misc_feature 1..101: note = Category: MG18 sgRNA
  misc_feature 1..101: note = Description: MG18-1 sgRNA
nnnnnnnnnnnnnnnnnnnnnngtttgagagtagtgaaaactacgagttcaaatacaattttttcaaattgccctatagggccctcacagtgtgagatttt

SEQ ID NO: 43 - RNA, 117 nt, synthetic construct
  source 1..117: mol_type = other RNA
  misc_feature 1..117: note = Category: MG21 sgRNA
  misc_feature 1..117: note = Description: MG21-1 sgRNA
nnnnnnnnnnnnnnnnnnnnnngttgtagttccccttttgaaaaaaagtgtgttactgcaataaggtaaaacaccacgaagctctgccctaactgccttagcagttagggcatcttt

SEQ ID NO: 44 - RNA, 134 nt, synthetic construct
  source 1..134: mol_type = other RNA
  misc_feature 1..134: note = Category: MG22 sgRNA
  misc_feature 1..134: note = Description: MG22-1 sgRNA
nnnnnnnnnnnnnnnnnnnnnngttgtgaattgctttcaaattagaaataattgaaagcaattcgcaataaggattattccgttgtgaaaacatttcgagtggcttcgtgaaattcacgaagtcacttcgtttt

SEQ ID NO: 45 - RNA, 113 nt, synthetic construct
  source 1..113: mol_type = other RNA
  misc_feature 1..113: note = Category: MG23 sgRNA
  misc_feature 1..113: note = Description: MG23-1 sgRNA
nnnnnnnnnnnnnnnnnnnnnngtttgagaacctgaaaaggtgagtgcaaataaggtttaaccgaaattgtttacctgcattgtgcagtataagaaagaccgcgaggtctttt

SEQ ID NO: 46-66 - skipped (21 entries)

SEQ ID NO: 67 - RNA, 110 nt, synthetic construct
  source 1..110: mol_type = other RNA
  misc_feature 1..110: note = Category: MG3 Hepa1-6 targeting guides (included in sgRNA)
  misc_feature 1..110: note = Description: MG3-6_3-4 guide sequence45 for targeting albumin intron 1
tgccagttcccgatcgttacaggttgagaatcgaaagattcttaataaggcatccttccgatgctgacttctcaccgtccgttttccaataggagcgggcggtatgtttt

SEQ ID NO: 68 - RNA, 110 nt, synthetic construct
  source 1..110: mol_type = other RNA
  misc_feature 1..110: note = Category: MG3 Hepa1-6 targeting guides (included in sgRNA)
  misc_feature 1..110: note = Description: MG3-6_3-4 guide sequence78 for targeting albumin intron 1
aaataccaggcttccattactagttgagaatcgaaagattcttaataaggcatccttccgatgctgacttctcaccgtccgttttccaataggagcgggcggtatgtttt

SEQ ID NO: 69 - RNA, 110 nt, synthetic construct
  source 1..110: mol_type = other RNA
  misc_feature 1..110: note = Description of Artificial Sequence: Syntheticpolynucleotide
  misc_feature 1..110: note = Category: MG3 Hepa1-6 targeting guides (included in sgRNA)
  misc_feature 1..110: note = Description: MG3-6_3-4 guide sequence24 for targeting albumin intron 1
atttacaaacatgacagaaacagttgagaatcgaaagattcttaataaggcatccttccgatgctgacttctcaccgtccgttttccaataggagcgggcggtatgtttt

SEQ ID NO: 70 - RNA, 110 nt, synthetic construct
  source 1..110: mol_type = other RNA
  misc_feature 1..110: note = Category: MG3 Hepa1-6 targeting guides (included in sgRNA)
  misc_feature 1..110: note = Description: MG3-6_3-4 guide sequence34 for targeting albumin intron 1
cttaggtcagtgaagagaagaagttgagaatcgaaagattcttaataaggcatccttccgatgctgacttctcaccgtccgttttccaataggagcgggcggtatgtttt

SEQ ID NO: 71 - RNA, 110 nt, synthetic construct
  source 1..110: mol_type = other RNA
  misc_feature 1..110: note = Category: MG3 Hepa1-6 targeting guides(included in sgRNA)
  misc_feature 1..110: note = Description: MG3-6_3-4 guide sequence44 for targeting albumin intron 1
atgccagttcccgatcgttacagttgagaatcgaaagattcttaataaggcatccttccgatgctgacttctcaccgtccgttttccaataggagcgggcggtatgtttt

SEQ ID NO: 72 - RNA, 110 nt, synthetic construct
  source 1..110: mol_type = other RNA
  misc_feature 1..110: note = Category: MG3 Hepa1-6 targeting guides (included in sgRNA)
  misc_feature 1..110: note = Description: MG3-6_3-4 guide sequence87 for targeting albumin intron 1
cttctcggcgaaacacacccctgttgagaatcgaaagattcttaataaggcatccttccgatgctgacttctcaccgtccgttttccaataggagcgggcggtatgtttt

SEQ ID NO: 73 - RNA, 110 nt, synthetic construct
  source 1..110: mol_type = other RNA
  misc_feature 1..110: note = Category: MG3 Hepa1-6 targeting guides (included in sgRNA)
  misc_feature 1..110: note = Description: MG3-6_3-4 guide sequence81 for targeting albumin intron 1
ctagaaaaatacaagcagagatgttgagaatcgaaagattcttaataaggcatccttccgatgctgacttctcaccgtccgttttccaataggagcgggcggtatgtttt

SEQ ID NO: 74 - RNA, 110 nt, synthetic construct
  source 1..110: mol_type = other RNA
  misc_feature 1..110: note = Category: MG3 Hepa1-6 targeting guides (included in sgRNA)
  misc_feature 1..110: note = Description: MG3-6_3-4 guide sequence72 for targeting albumin intron 1
aataataatctagaaatcagcagttgagaatcgaaagattcttaataaggcatccttccgatgctgacttctcaccgtccgttttccaataggagcgggcggtatgtttt

SEQ ID NO: 75 - RNA, 110 nt, synthetic construct
  source 1..110: mol_type = other RNA
  misc_feature 1..110: note = Category: MG3 Hepa1-6 targeting guides (included in sgRNA)
  misc_feature 1..110: note = Description: MG3-6_3-4 guide sequence16 for targeting albumin intron 1
ctgcctgctcgaccatgctatagttgagaatcgaaagattcttaataaggcatccttccgatgctgacttctcaccgtccgttttccaataggagcgggcggtatgtttt

SEQ ID NO: 76 - RNA, 110 nt, synthetic construct
  source 1..110: mol_type = other RNA
  misc_feature 1..110: note = Category: MG3 Hepa1-6 targeting guides (included in sgRNA)
  misc_feature 1..110: note = Description: MG3-6_3-4 guide sequence59 for targeting albumin intron 1
aggcaggccctatgagaccgtagttgagaatcgaaagattcttaataaggcatccttccgatgctgacttctcaccgtccgttttccaataggagcgggcggtatgtttt

SEQ ID NO: 77 - RNA, 110 nt, synthetic construct
  source 1..110: mol_type = other RNA
  misc_feature 1..110: note = Category: MG3 Hepa1-6 targeting guides (included in sgRNA)
  misc_feature 1..110: note = Description: MG3-6_3-4 guide sequence30 for targeting albumin intron 1
ttttaaaaataataatgttggtgttgagaatcgaaagattcttaataaggcatccttccgatgctgacttctcaccgtccgttttccaataggagcgggcggtatgtttt

SEQ ID NO: 78 - RNA, 110 nt, synthetic construct
  source 1..110: mol_type = other RNA
  misc_feature 1..110: note = Category: MG3 Hepa1-6 targeting guides (included in sgRNA)
  misc_feature 1..110: note = Description: MG3-6_3-4 guide sequence20 for targeting albumin intron 1
tcgaccatgctatactaaaaatgttgagaatcgaaagattcttaataaggcatccttccgatgctgacttctcaccgtccgttttccaataggagcgggcggtatgtttt

SEQ ID NO: 79 - RNA, 110 nt, synthetic construct
  source 1..110: mol_type = other RNA
  misc_feature 1..110: note = Category: MG3 Hepa1-6 targeting guides (included in sgRNA)
  misc_feature 1..110: note = Description: MG3-6_3-4 guide sequence84 for targeting albumin intron 1
atacaagcagagatgaaaaaacgttgagaatcgaaagattcttaataaggcatccttccgatgctgacttctcaccgtccgttttccaataggagcgggcggtatgtttt

SEQ ID NO: 80 - RNA, 110 nt, synthetic construct
  source 1..110: mol_type = other RNA
  misc_feature 1..110: note = Category: MG3 Hepa1-6 targeting guides (included in sgRNA)
  misc_feature 1..110: note = Description: MG3-6_3-4 guide sequence33 for targeting albumin intron 1
gcttaggtcagtgaagagaagagttgagaatcgaaagattcttaataaggcatccttccgatgctgacttctcaccgtccgttttccaataggagcgggcggtatgtttt

SEQ ID NO: 81 - RNA, 110 nt, synthetic construct
  source 1..110: mol_type = other RNA
  misc_feature 1..110: note = Category: MG3 Hepa1-6 targeting guides (included in sgRNA)
  misc_feature 1..110: note = Description: MG3-6_3-4 guide sequence64 for targeting albumin intron 1
aaagaaatttaaagctaagcttgttgagaatcgaaagattcttaataaggcatccttccgatgctgacttctcaccgtccgttttccaataggagcgggcggtatgtttt

SEQ ID NO: 82 - RNA, 110 nt, synthetic construct
  source 1..110: mol_type = other RNA
  misc_feature 1..110: note = Category: MG3 Hepa1-6 targeting guides (included in sgRNA)
  misc_feature 1..110: note = Description: MG3-6_3-4 guide sequence53 for targeting albumin intron 1
ctaagacaatggtaaataagaagttgagaatcgaaagattcttaataaggcatccttccgatgctgacttctcaccgtccgttttccaataggagcgggcggtatgtttt

SEQ ID NO: 83 - RNA, 110 nt, synthetic construct
  source 1..110: mol_type = other RNA
  misc_feature 1..110: note = Category: MG3 Hepa1-6 targeting guides (included in sgRNA)
  misc_feature 1..110: note = Description: MG3-6_3-4 guide sequence73 for targeting albumin intron 1
taatctagaaatcagcactaaagttgagaatcgaaagattcttaataaggcatccttccgatgctgacttctcaccgtccgttttccaataggagcgggcggtatgtttt

SEQ ID NO: 84 - RNA, 110 nt, synthetic construct
  source 1..110: mol_type = other RNA
  misc_feature 1..110: note = Category: MG3 Hepa1-6 targeting guides (included in sgRNA)
  misc_feature 1..110: note = Description: MG3-6_3-4 guide sequence74 for targeting albumin intron 1
aatctagaaatcagcactaaaggttgagaatcgaaagattcttaataaggcatccttccgatgctgacttctcaccgtccgttttccaataggagcgggcggtatgtttt

SEQ ID NO: 85 - RNA, 110 nt, synthetic construct
  source 1..110: mol_type = other RNA
  misc_feature 1..110: note = Category: MG3 Hepa1-6 targeting guides (included in sgRNA)
  misc_feature 1..110: note = Description: MG3-6_3-4 guide sequence13 for targeting albumin intron 1
ctttaaatttcttttaattaaagttgagaatcgaaagattcttaataaggcatccttccgatgctgacttctcaccgtccgttttccaataggagcgggcggtatgtttt

SEQ ID NO: 86 - RNA, 110 nt, synthetic construct
  source 1..110: mol_type = other RNA
  misc_feature 1..110: note = Category: MG3 Hepa1-6 targeting guides (included in sgRNA)
  misc_feature 1..110: note = Description: MG3-6_3-4 guide sequence19 for targeting albumin intron 1
ctcgaccatgctatactaaaaagttgagaatcgaaagattcttaataaggcatccttccgatgctgacttctcaccgtccgttttccaataggagcgggcggtatgtttt

SEQ ID NO: 87 - DNA, 50 bp, synthetic construct
  source 1..50: mol_type = other DNA
  misc_feature 1..50: note = Category: primer
  misc_feature 1..50: note = Description: Amplify MG3-6(718-840) forMG3-6(1-840)_MG15-1(818-1082)
gtcacccgcgaaagtcgtcgcgccggcggcatcgatgaacgcatcctgtt

SEQ ID NO: 88 - DNA, 54 bp, synthetic construct
  source 1..54: mol_type = other DNA
  misc_feature 1..54: note = Category: primer
  misc_feature 1..54: note = Description: Amplify MG3-6(718-840) forMG3-6(1-840)_MG15-1(818-1082)
tagtctctttgtgggcaggaccgtggatcttctctaagtgaacagatccatttt

SEQ ID NO: 89 - DNA, 48 bp, synthetic construct
  source 1..48: mol_type = other DNA
  misc_feature 1..48: note = Category: primer
  misc_feature 1..48: note = Description: Amplify MG15-1(818-1082) forMG3-6(1-840)_MG15-1(818-1082)
cgcccgcaaaatggatctgttcacttagagaagatccacggtcctgcc

SEQ ID NO: 90 - DNA, 50 bp, synthetic construct
  source 1..50: mol_type = other DNA
  misc_feature 1..50: note = Category: primer
  misc_feature 1..50: note = Description: Amplify MG15-1(818-1082) forMG3-6(1-840)_MG15-1(818-1082)
gttatcagtggtggtggtggtggtgctcgagacggaacgtttggcgcttc

SEQ ID NO: 91 - DNA, 48 bp, synthetic construct
  source 1..48: mol_type = other DNA
  misc_feature 1..48: note = Category: primer
  misc_feature 1..48: note = Description: Amplify MG3-6(718-922) forMG3-6(1-922)_MG15-1(931-1082)
ggcgcgaaagacgtcgatgcgaaccatgttgatttccgctacgccacg

SEQ ID NO: 92 - DNA, 48 bp, synthetic construct
  source 1..48: mol_type = other DNA
  misc_feature 1..48: note = Category: primer
  misc_feature 1..48: note = Description: Amplify MG15-1(931-1082) forMG3-6(1-922)_MG15-1(931-1082)
tcctgaccccgcgtggcgtagcggaaatcaacatggttcgcatcgacg

SEQ ID NO: 93 - DNA, 38 bp, synthetic construct
  source 1..38: mol_type = other DNA
  misc_feature 1..38: note = Category: primer
  misc_feature 1..38: note = Description: LA065 primer used for PCR in PAM enrichment assay
gctcttccgatctnnnnnattgacggcggcatcggact

SEQ ID NO: 94 - DNA, 35 bp, synthetic construct
  source 1..35: mol_type = other DNA
  misc_feature 1..35: note = Category: primer
  misc_feature 1..35: note = Description: LA125 primer used for PCR in PAM enrichment assay
gctcttccgatctnnnnnggtgttggcgggtgtcg

SEQ ID NO: 95 - DNA, 20 bp, synthetic construct
  source 1..20: mol_type = other DNA
  misc_feature 1..20: note = Category: primer
  misc_feature 1..20: note = Description: LA003 PAM enrichment adapter(heteroduplex of LA003/LA011)
attgacggcggcatcggact

SEQ ID NO: 96 - DNA, 21 bp, synthetic construct
  source 1..21: mol_type = other DNA
  misc_feature 1..21: note = Category: primer
  misc_feature 1..21: note = Description: LA011 PAM enrichment adapter(heteroduplex of LA003/LA011)
agtccgatgccgccgtcaatt

SEQ ID NO: 97 - DNA, 20 bp, synthetic construct
  source 1..20: mol_type = other DNA
  misc_feature 1..20: note = Category: primer
  misc_feature 1..20: note = Description: 57F primer used for Sangersequencing of edited Hepa1-6 cells
tctggcaaaatgaagtgggt

SEQ ID NO: 98 - DNA, 20 bp, synthetic construct
  source 1..20: mol_type = other DNA
  misc_feature 1..20: note = Category: primer
  misc_feature 1..20: note = Description: 1072R primer used for Sangersequencing of edited Hepa1-6 cells
tgccacattgctcagcacag

SEQ ID NO: 99 - DNA, 20 bp, synthetic construct
  source 1..20: mol_type = other DNA
  misc_feature 1..20: note = Category: primer
  misc_feature 1..20: note = Description: 132F primer used for Sangersequencing of edited Hepa1-6 cells
cgccgagaagcacgtaagag

SEQ ID NO: 100 - DNA, 21 bp, synthetic construct
  source 1..21: mol_type = other DNA
  misc_feature 1..21: note = Category: primer
  misc_feature 1..21: note = Description: 282F primer used for Sangersequencing of edited Hepa1-6 cells
ttgcatctgagaacccttagg

SEQ ID NO: 101 - DNA, 23 bp, synthetic construct
  source 1..23: mol_type = other DNA
  misc_feature 1..23: note = Category: primer
  misc_feature 1..23: note = Description: 446R primer used for Sangersequencing of edited Hepa1-6 cells
ccgtaataaattcaactgtatcc

SEQ ID NO: 102 - DNA, 20 bp, synthetic construct
  source 1..20: mol_type = other DNA
  misc_feature 1..20: note = Category: primer
  misc_feature 1..20: note = Description: 460F primer used for Sangersequencing of edited Hepa1-6 cells
gcctgctcgaccatgctata

SEQ ID NO: 103 - DNA, 8755 bp, synthetic construct
  source 1..8755: mol_type = other DNA
  misc_feature 1..8755: note = Category: plasmid
  misc_feature 1..8755: note = Description: pMGX3-6 plasmid
ctcgagcaccaccaccaccaccactgataacaaagcccgaaaggaagctgagttggctgctgccaccgctgagcaataactagcataaccccttggggcctctaaacgggtcttgaggggttttttgctgaaaggaggaactatatccggattggcgaatgggacgcgccctgtagcggcgcattaagcgcggcgggtgtggtggttacgcgcagcgtgaccgctacacttgccagcgccctagcgcccgctcctttcgctttcttcccttcctttctcgccacgttcgccggctttccccgtcaagctctaaatcgggggctccctttagggttccgatttagtgctttacggcacctcgaccccaaaaaacttgattagggtgatggttcacgtagtgggccatcgccctgatagacggtttttcgccctttgacgttggagtccacgttctttaatagtggactcttgttccaaactggaacaacactcaaccctatctcggtctattcttttgatttataagggattttgccgatttcggcctattggttaaaaaatgagctgatttaacaaaaatttaacgcgaattttaacaaaatattaacgtttacaatttcaggtggcacttttcggggaaatgtgcgcggaacccctatttgtttatttttctaaatacattcaaatatgtatccgctcatgagacaataaccctgataaatgcttcaataatattgaaaaaggaagagtatgagtattcaacatttccgtgtcgcccttattcccttttttgcggcattttgccttcctgtttttgctcacccagaaacgctggtgaaagtaaaagatgctgaagatcagttgggtgcacgagtgggttacatcgaactggatctcaacagcggtaagatccttgagagttttcgccccgaagaacgttttccaatgatgagcacttttaaagttctgctatgtggcgcggtattatcccgtattgacgccgggcaagagcaactcggtcgccgcatacactattctcagaatgacttggttgagtactcaccagtcacagaaaagcatcttacggatggcatgacagtaagagaattatgcagtgctgccataaccatgagtgataacactgcggccaacttacttctgacaacgatcggaggaccgaaggagctaaccgcttttttgcacaacatgggggatcatgtaactcgccttgatcgttgggaaccggagctgaatgaagccataccaaacgacgagcgtgacaccacgatgcctgcagcaatggcaacaacgttgcgcaaactattaactggcgaactacttactctagcttcccggcaacaattaatagactggatggaggcggataaagttgcaggaccacttctgcgctcggcccttccggctggctggtttattgctgataaatctggagccggtgagcgtgggtctcgcggtatcattgcagcactggggccagatggtaagccctcccgtatcgtagttatctacacgacggggagtcaggcaactatggatgaacgaaatagacagatcgctgagataggtgcctcactgattaagcattggtaactgtcagaccaagtttactcatatatactttagattgatttaaaacttcatttttaatttaaaaggatctaggtgaagatcctttttgataatctcatgaccaaaatcccttaacgtgagttttcgttccactgagcgtcagaccccgtagaaaagatcaaaggatcttcttgagatcctttttttctgcgcgtaatctgctgcttgcaaacaaaaaaaccaccgctaccagcggtggtttgtttgccggatcaagagctaccaactctttttccgaaggtaactggcttcagcagagcgcagataccaaatactgtccttctagtgtagccgtagttaggccaccacttcaagaactctgtagcaccgcctacatacctcgctctgctaatcctgttaccagtggctgctgccagtggcgataagtcgtgtcttaccgggttggactcaagacgatagttaccggataaggcgcagcggtcgggctgaacggggggttcgtgcacacagcccagcttggagcgaacgacctacaccgaactgagatacctacagcgtgagctatgagaaagcgccacgcttcccgaagggagaaaggcggacaggtatccggtaagcggcagggtcggaacaggagagcgcacgagggagcttccagggggaaacgcctggtatctttatagtcctgtcgggtttcgccacctctgacttgagcgtcgatttttgtgatgctcgtcaggggggcggagcctatggaaaaacgccagcaacgcggcctttttacggttcctggccttttgctggccttttgctcacatgttctttcctgcgttatcccctgattctgtggataaccgtattaccgcctttgagtgagctgataccgctcgccgcagccgaacgaccgagcgcagcgagtcagtgagcgaggaagcggaagagcgcctgatgcggtattttctccttacgcatctgtgcggtatttcacaccgcatatatggtgcactctcagtacaatctgctctgatgccgcatagttaagccagtatacactccgctatcgctacgtgactgggtcatggctgcgccccgacacccgccaacacccgctgacgcgccctgacgggcttgtctgctcccggcatccgcttacagacaagctgtgaccgtctccgggagctgcatgtgtcagaggttttcaccgtcatcaccgaaacgcgcgaggcagctgcggtaaagctcatcagcgtggtcgtgaagcgattcacagatgtctgcctgttcatccgcgtccagctcgttgagtttctccagaagcgttaatgtctggcttctgataaagcgggccatgttaagggcggttttttcctgtttggtcactgatgcctccgtgtaagggggatttctgttcatgggggtaatgataccgatgaaacgagagaggatgctcacgatacgggttactgatgatgaacatgcccggttactggaacgttgtgagggtaaacaactggcggtatggatgcggcgggaccagagaaaaatcactcagggtcaatgccagcgcttcgttaatacagatgtaggtgttccacagggtagccagcagcatcctgcgatgcagatccggaacataatggtgcagggcgctgacttccgcgtttccagactttacgaaacacggaaaccgaagaccattcatgttgttgctcaggtcgcagacgttttgcagcagcagtcgcttcacgttcgctcgcgtatcggtgattcattctgctaaccagtaaggcaaccccgccagcctagccgggtcctcaacgacaggagcacgatcatgcgcacccgtggggccgccatgccggcgataatggcctgcttctcgccgaaacgtttggtggcgggaccagtgacgaaggcttgagcgagggcgtgcaagattccgaataccgcaagcgacaggccgatcatcgtcgcgctccagcgaaagcggtcctcgccgaaaatgacccagagcgctgccggcacctgtcctacgagttgcatgataaagaagacagtcataagtgcggcgacgatagtcatgccccgcgcccaccggaaggagctgactgggttgaaggctctcaagggcatcggtcgagatcccggtgcctaatgagtgagctaacttacattaattgcgttgcgctcactgcccgctttccagtcgggaaacctgtcgtgccagctgcattaatgaatcggccaacgcgcggggagaggcggtttgcgtattgggcgccagggtggtttttcttttcaccagtgagacgggcaacagctgattgcccttcaccgcctggccctgagagagttgcagcaagcggtccacgctggtttgccccagcaggcgaaaatcctgtttgatggtggttaacggcgggatataacatgagctgtcttcggtatcgtcgtatcccactaccgagatatccgcaccaacgcgcagcccggactcggtaatggcgcgcattgcgcccagcgccatctgatcgttggcaaccagcatcgcagtgggaacgatgccctcattcagcatttgcatggtttgttgaaaaccggacatggcactccagtcgccttcccgttccgctatcggctgaatttgattgcgagtgagatatttatgccagccagccagacgcagacgcgccgagacagaacttaatgggcccgctaacagcgcgatttgctggtgacccaatgcgaccagatgctccacgcccagtcgcgtaccgtcttcatgggagaaaataatactgttgatgggtgtctggtcagagacatcaagaaataacgccggaacattagtgcaggcagcttccacagcaatggcatcctggtcatccagcggatagttaatgatcagcccactgacgcgttgcgcgagaagattgtgcaccgccgctttacaggcttcgacgccgcttcgttctaccatcgacaccaccacgctggcacccagttgatcggcgcgagatttaatcgccgcgacaatttgcgacggcgcgtgcagggccagactggaggtggcaacgccaatcagcaacgactgtttgcccgccagttgttgtgccacgcggttgggaatgtaattcagctccgccatcgccgcttccactttttcccgcgttttcgcagaaacgtggctggcctggttcaccacgcgggaaacggtctgataagagacaccggcatactctgcgacatcgtataacgttactggtttcacattcaccaccctgaattgactctcttccgggcgctatcatgccataccgcgaaaggttttgcgccattcgatggtgtccgggatctcgacgctctcccttatgcgactcctgcattaggaagcagcccagtagtaggttgaggccgttgagcaccgccgccgcaaggaatggtgcatgcaaggagatggcgcccaacagtcccccggccacggggcctgccaccatacccacgccgaaacaagcgctcatgagcccgaagtggcgagcccgatcttccccatcggtgatgtcggcgatataggcgccagcaaccgcacctgtggcgccggtgatgccggccacgatgcgtccggcgtagaggatcgagatctcgatcccgcgaaattaatacgactcactataggaattgtgagcggataacaattcccctctagaaataattttgtttaactttaagaaggagatataccatgtcaaccgatatgaagaattatcgcattggcgtggacgtcggggatcgcagcgtaggcttggcagcgattgagttcgacgacgacgggctgccgattcagaaactggcattagttacctttcgtcatgacggtggcctcgacccaaccaagaacaaaacgcctatgtcgcgcaaagagacccgcgggatcgcgcgccgcaccatgcgtatgaatcgcgaacgcaaacgccgccttcgcaatttggacaacgtactggagaacttaggctatagcgtacctgagggacctgaaccggaaacttacgaagcctggacgagccgcgcactcttggcaagcattaaattagcatccgccgacgaattaaacgaacacctggttcgtgccgttcgccacatggcgcgccatcgcggctgggcaaacccctggtggagcctggatcaactcgaaaaggcatcacaagaacccagcgaaaccttcgaaatcatcttagcacgcgcacgcgaattattcggcgagaaagtaccagcgaaccccacccttgggatgctgggagcgctggcggcaaacaacgaagtgctgctccgcccacgtgacgagaagaaacgcaaaacgggatacgtacgtggaacgccgttgatgttcgcacaagtgcgccaaggcgatcaattagccgaattacgccgcatctgtgaagtacaaggcatcgaagatcaatatgaagcgctgcgtctgggtgtctttgatcacaaacatccgtacgtcccaaaagagcgcgttggcaaagatccgttgaacccgagcaccaaccgtaccatccgcgcaagccttgaattccaagaatttcgtatcttagacagtgttgccaatctccgcgttcgtatcggcagtcgcgccaaacgcgaactcaccgaagcggaatacgacgcagcggtagaatttctgatggattacgcggacaaagagcagcctagttgggcggacgtggcggaaaagatcggggtgccgggcaatcgtctggtagcccccgtcttagaagacgtacaacagaaaacagccccttacgatcgttcttctgcggcgttcgaaaaggctatggggaagaaaactgaagcccgccaatggtgggagtcgacggacgacgatcaactgcgcagccttctgatcgcgttcctggtggacgccactaatgacaccgaggaagctgccgcggaagccggattaagcgaattgtacaaatcctggcccgcggaagagcgcgaggctttaagcaatatcgacttcgaaaagggtcgcgtggcgtactcacaagaaacactgtccaagttaagtgaatatatgcacgaatatcgcgtcgggctgcatgaagcacgtaaagcagtatttggggttgacgacacgtggcgcccacctctggacaaattagaagagcctaccggacaacctgcagtagaccgtgtcctcaccatcttacgccgcttcgtattggactgcgaacgccaatggggtcgccctcgtgccatcaccgtagagcacactcgcactggtcttatgggcccgactcaacgccaaaagatcttgaacgaacaaaagaagaatcgcgcagacaacgaacgcatccgtgacgaactgcgcgaaagcggagttgacaacccaagtcgtgctgaggtgcgccgtcacttaatcgttcaagaacaagaatgccaatgtctgtattgtggtaccatgatcacaactaccaccagcgaactcgaccacatcgtaccacgcgcaggcggtggcagcagccgccgcgaaaacttggccgccgtatgtcgcgcctgcaacgcaaagaagaaacgcgagttgttttacgcctgggcgggaccggtcaaatcccaagaaacaatcgaacgcgtgcgtcaactgaaagcattcaaagactcaaagaaagctaagatgtttaagaaccaaatccgccgcctgaaccaaacagaagcggacgaacctatcgacgaacgctctctcgcgagcaccagctacgctgccgttgccgtccgcgaacgcttagagcaacatttcaacgaaggactggccctcgatgacaaatcacgtgtcgttttagacgtgtatgcgggcgcggtcacccgcgaaagtcgtcgcgccggcggcatcgatgaacgcatcctgttgcgtggcgaacgtgacaagaatcgcttcgacgttcgtcaccatgccgtggacgcggcagtaatgacgttgttgaatcgctctgtggcattaacgctcgaacaacgttcgcaacttcgtcgtaccttctacgaacaaggcttggacaagttagatcgcaaccaattaaaacccgaggaagactggcgcgatttcacagggttagccccagccagccaagagaaatttctggaatggcgcaaagcggcgaccatcttaggggatcttctggccgaagcaattgaagacgatagcatcgccgtggtatctccgttacgccttcgcccgcaaaatggatctgttcacttagagaccattagcgcggttaagaaacagacgctgggaagcgactggccggcagacgccgtcaaacgcatcgtcgaccctgaaatctaccttgcaatgaaagacgcgctggggaaattaaaagaattgccggaagactccgctcgtagcctggaattacctgacgggcgtttcgtggaagcggacgacgaagtgctcttctttcccgaaaatgcggccagcatcctgaccccgcgtggcgtagcggaaatcggcggaagcatccaccacgcgcgtctgtatgggtggttaaccaagaaaggtgaattaaaagttggcatgctgcgcgtatacggcgccgaatttccatggcttatgcgcgaatcgggcagccgtaacgtgctctctatgcctatccatcgcggcagccaatcatttcgcgacatgcaagatactacccgcaaggcggtagagtccggggaagcagtagaattcgcatggatcacgcaaaatgacgaattagaattcgaccctgacgattatatcgcgcacggcggtaaagacgaactccgccagttcttaggcttcatgcctgagtgtcgttggcgcgtcgacggcttcaagaagaattaccaaattcgcatccgtccggccatgttgtcgcgcgagcaacttcccagtgatatccaacgccgcctggagagcaagaccttgacgaagaatgagagccttctgttaaaggccttagacacgggcttagtggtggccatcggtggcctgctgccgttggagaccctgaaagtgatccgtcgtaacaatctgggttttccgcgctggcgtggcaacggtaacttgcccaccagtttcgaggtgcgctccagcgctctgcgcgcgcttggagtagagggg

SEQ ID NO: 104 - DNA, 8599 bp, synthetic construct
  source 1..8599: mol_type = other DNA
  misc_feature 1..8599: note = Category: plasmid
  misc_feature 1..8599: note = Description: pMGX15-1 plasmid
ctcgagcaccaccaccaccaccactgataacaaagcccgaaaggaagctgagttggctgctgccaccgctgagcaataactagcataaccccttggggcctctaaacgggtcttgaggggttttttgctgaaaggaggaactatatccggattggcgaatgggacgcgccctgtagcggcgcattaagcgcggcgggtgtggtggttacgcgcagcgtgaccgctacacttgccagcgccctagcgcccgctcctttcgctttcttcccttcctttctcgccacgttcgccggctttccccgtcaagctctaaatcgggggctccctttagggttccgatttagtgctttacggcacctcgaccccaaaaaacttgattagggtgatggttcacgtagtgggccatcgccctgatagacggtttttcgccctttgacgttggagtccacgttctttaatagtggactcttgttccaaactggaacaacactcaaccctatctcggtctattcttttgatttataagggattttgccgatttcggcctattggttaaaaaatgagctgatttaacaaaaatttaacgcgaattttaacaaaatattaacgtttacaatttcaggtggcacttttcggggaaatgtgcgcggaacccctatttgtttatttttctaaatacattcaaatatgtatccgctcatgagacaataaccctgataaatgcttcaataatattgaaaaaggaagagtatgagtattcaacatttccgtgtcgcccttattcccttttttgcggcattttgccttcctgtttttgctcacccagaaacgctggtgaaagtaaaagatgctgaagatcagttgggtgcacgagtgggttacatcgaactggatctcaacagcggtaagatccttgagagttttcgccccgaagaacgttttccaatgatgagcacttttaaagttctgctatgtggcgcggtattatcccgtattgacgccgggcaagagcaactcggtcgccgcatacactattctcagaatgacttggttgagtactcaccagtcacagaaaagcatcttacggatggcatgacagtaagagaattatgcagtgctgccataaccatgagtgataacactgcggccaacttacttctgacaacgatcggaggaccgaaggagctaaccgcttttttgcacaacatgggggatcatgtaactcgccttgatcgttgggaaccggagctgaatgaagccataccaaacgacgagcgtgacaccacgatgcctgcagcaatggcaacaacgttgcgcaaactattaactggcgaactacttactctagcttcccggcaacaattaatagactggatggaggcggataaagttgcaggaccacttctgcgctcggcccttccggctggctggtttattgctgataaatctggagccggtgagcgtgggtctcgcggtatcattgcagcactggggccagatggtaagccctcccgtatcgtagttatctacacgacggggagtcaggcaactatggatgaacgaaatagacagatcgctgagataggtgcctcactgattaagcattggtaactgtcagaccaagtttactcatatatactttagattgatttaaaacttcatttttaatttaaaaggatctaggtgaagatcctttttgataatctcatgaccaaaatcccttaacgtgagttttcgttccactgagcgtcagaccccgtagaaaagatcaaaggatcttcttgagatcctttttttctgcgcgtaatctgctgcttgcaaacaaaaaaaccaccgctaccagcggtggtttgtttgccggatcaagagctaccaactctttttccgaaggtaactggcttcagcagagcgcagataccaaatactgtccttctagtgtagccgtagttaggccaccacttcaagaactctgtagcaccgcctacatacctcgctctgctaatcctgttaccagtggctgctgccagtggcgataagtcgtgtcttaccgggttggactcaagacgatagttaccggataaggcgcagcggtcgggctgaacggggggttcgtgcacacagcccagcttggagcgaacgacctacaccgaactgagatacctacagcgtgagctatgagaaagcgccacgcttcccgaagggagaaaggcggacaggtatccggtaagcggcagggtcggaacaggagagcgcacgagggagcttccagggggaaacgcctggtatctttatagtcctgtcgggtttcgccacctctgacttgagcgtcgatttttgtgatgctcgtcaggggggcggagcctatggaaaaacgccagcaacgcggcctttttacggttcctggccttttgctggccttttgctcacatgttctttcctgcgttatcccctgattctgtggataaccgtattaccgcctttgagtgagctgataccgctcgccgcagccgaacgaccgagcgcagcgagtcagtgagcgaggaagcggaagagcgcctgatgcggtattttctccttacgcatctgtgcggtatttcacaccgcatatatggtgcactctcagtacaatctgctctgatgccgcatagttaagccagtatacactccgctatcgctacgtgactgggtcatggctgcgccccgacacccgccaacacccgctgacgcgccctgacgggcttgtctgctcccggcatccgcttacagacaagctgtgaccgtctccgggagctgcatgtgtcagaggttttcaccgtcatcaccgaaacgcgcgaggcagctgcggtaaagctcatcagcgtggtcgtgaagcgattcacagatgtctgcctgttcatccgcgtccagctcgttgagtttctccagaagcgttaatgtctggcttctgataaagcgggccatgttaagggcggttttttcctgtttggtcactgatgcctccgtgtaagggggatttctgttcatgggggtaatgataccgatgaaacgagagaggatgctcacgatacgggttactgatgatgaacatgcccggttactggaacgttgtgagggtaaacaactggcggtatggatgcggcgggaccagagaaaaatcactcagggtcaatgccagcgcttcgttaatacagatgtaggtgttccacagggtagccagcagcatcctgcgatgcagatccggaacataatggtgcagggcgctgacttccgcgtttccagactttacgaaacacggaaaccgaagaccattcatgttgttgctcaggtcgcagacgttttgcagcagcagtcgcttcacgttcgctcgcgtatcggtgattcattctgctaaccagtaaggcaaccccgccagcctagccgggtcctcaacgacaggagcacgatcatgcgcacccgtggggccgccatgccggcgataatggcctgcttctcgccgaaacgtttggtggcgggaccagtgacgaaggcttgagcgagggcgtgcaagattccgaataccgcaagcgacaggccgatcatcgtcgcgctccagcgaaagcggtcctcgccgaaaatgacccagagcgctgccggcacctgtcctacgagttgcatgataaagaagacagtcataagtgcggcgacgatagtcatgccccgcgcccaccggaaggagctgactgggttgaaggctctcaagggcatcggtcgagatcccggtgcctaatgagtgagctaacttacattaattgcgttgcgctcactgcccgctttccagtcgggaaacctgtcgtgccagctgcattaatgaatcggccaacgcgcggggagaggcggtttgcgtattgggcgccagggtggtttttcttttcaccagtgagacgggcaacagctgattgcccttcaccgcctggccctgagagagttgcagcaagcggtccacgctggtttgccccagcaggcgaaaatcctgtttgatggtggttaacggcgggatataacatgagctgtcttcggtatcgtcgtatcccactaccgagatatccgcaccaacgcgcagcccggactcggtaatggcgcgcattgcgcccagcgccatctgatcgttggcaaccagcatcgcagtgggaacgatgccctcattcagcatttgcatggtttgttgaaaaccggacatggcactccagtcgccttcccgttccgctatcggctgaatttgattgcgagtgagatatttatgccagccagccagacgcagacgcgccgagacagaacttaatgggcccgctaacagcgcgatttgctggtgacccaatgcgaccagatgctccacgcccagtcgcgtaccgtcttcatgggagaaaataatactgttgatgggtgtctggtcagagacatcaagaaataacgccggaacattagtgcaggcagcttccacagcaatggcatcctggtcatccagcggatagttaatgatcagcccactgacgcgttgcgcgagaagattgtgcaccgccgctttacaggcttcgacgccgcttcgttctaccatcgacaccaccacgctggcacccagttgatcggcgcgagatttaatcgccgcgacaatttgcgacggcgcgtgcagggccagactggaggtggcaacgccaatcagcaacgactgtttgcccgccagttgttgtgccacgcggttgggaatgtaattcagctccgccatcgccgcttccactttttcccgcgttttcgcagaaacgtggctggcctggttcaccacgcgggaaacggtctgataagagacaccggcatactctgcgacatcgtataacgttactggtttcacattcaccaccctgaattgactctcttccgggcgctatcatgccataccgcgaaaggttttgcgccattcgatggtgtccgggatctcgacgctctcccttatgcgactcctgcattaggaagcagcccagtagtaggttgaggccgttgagcaccgccgccgcaaggaatggtgcatgcaaggagatggcgcccaacagtcccccggccacggggcctgccaccatacccacgccgaaacaagcgctcatgagcccgaagtggcgagcccgatcttccccatcggtgatgtcggcgatataggcgccagcaaccgcacctgtggcgccggtgatgccggccacgatgcgtccggcgtagaggatcgagatctcgatcccgcgaaattaatacgactcactataggaattgtgagcggataacaattcccctctagaaataattttgtttaactttaagaaggagatataccatgaactatgtgctcggcctggacgtcggtattgcttcagtgggatgggccgtgcttgagttgaatgaagaggacaaccccattcgcattgagggtcttggtgcgcgcatcttcgataaagcggaagtgcccaaaaccggggccagtctcgccgcacctcgtcgcatgagtcgtggcatccgtcgcgtgattcgtcgtcgccgctttcgcttacaacgcgtccgctcatacctgaagaagcacaacattctccctgccgagaaggttgatcacttatacgacgttccatctgccatcgacatctacgagctccgtaagcgcgcactgactgagaaggtcacagccgaggagtgggcgcgcctgttaatcttcttcgcgaaacaccgtggtttcaagtccaaccgcaagaaggcttcgggagacgccgacgagggcgagatgctcaaggcgatcgcagcaaacgccgaaatcctgaagaactatcgtacagtgggagagatgctgtgcgacaacgagaagtttcgtaaacgtaagcgtaatcgcgatggcgcatacaactttactgtctctcgtgcgatgctgatggaagaaattcacacgctgttcgagattcaacgcaacttgggccagaagttcgcggacgagaagctggaagaggagtacgtgatcctcttcgccgctcaacgtaaattcgatgaaggacctggagaaaattcgccgtacgcggggaaccagattgagaagatgatcggttcctgcacgttagagggcaagaaagagaagcgtgctccaaaggcctcatacgcatttatggcatttaatttatggcaaaagatcaatcacttgaaagtcaatcgtcgtggtagtgaacgcttcctgaccgaagaggagcgccgccgcattgcggacctggcgtggaagaaggagaagcttacctacggttcactgcgtaaggtgctctcgttggaccccgaggatcgcttcgttggcctgcgttacgacctcaagaaaggcaaggccgagaacttagaagaacccgtttctgaggcagaaaagcgttccttttcatgggtcaaggattatcactccattcgtaaggcccttgacaaggtggagaagaatcgcattttgaagctctctcacgagcaactggacacaattgccaccgcgtttagtgtttacaagaacgaagagaccattgaaaagtacctggaagagggcggcattggtaaggccgacggtgaggcgctgcttgagcgtttgagcggatttagcaagtttggtcacctgagcctgaaggcgtgttataagctgctgccgttcctggagaagggcgaggtgtactcacgcgcttgtgagttggcggggtacgactttagtaaatcgtccttggagaacattgacgacattccgaacccggtcgtaaagcgctcgatttctcagacccttaaggtgattaacgcgatcattctgcgctacggcaacccagttgaggttcacattgagttagcacgtgagctcgcccgttcttttcgcgaccgcaagaagatggagaagggtatgcaagagaaccaagcgaagaacgagaaaattcgtcagcgcctgattagtgagttcggggtgctgcgcccaaaaggcatggacattgttaagttcaaattatgtgaggaacaaaacggggagtgtgcctactcgcaaaagcactttgacatggaaaagttacttaaggacccgagttacgccgaggttgaccacattatcccgtactcacgctcattcgacgacagttataacaacaaggtgctggttctgacgaaggagaatcgtgagaaacgtaatcgtatcccgatggagtacctcgccgacgcgcctgagcgcaagaaccgtttcattcactgggtcaaatccacaatccgcaatagtcgcaaacgtgagaatcttctgcgtaccgattacacggcgactaccgagaatgagtggaagcgccgtaacctgcaggacactcaatacatttcgaaatatttatataactacctgcgccatcacctggtccttgcgaaaggttacacagagcgtaagcgtcgcatcattccggttaacggtgctgtaaccgcatactttcgcaaacgcctgggtattaacaagattcgtgagaatggcgacctgcatcacgcggtggacgccgttattattgcgtgtgccacacagggaatcgtcaacaaagtttcccgctatagtaaatcgcgcgaactctgggactacgaggtcgacatggagacgggtgaggtgctgcagaagaagaacaagaataccaaggatgtctttccggagccgtggcttaactttcgttacgagttggagcagaaggttcgtgtgcgccccttggacattcccgagacggcagacatcacggagatggaagagccgttcgttagtcatatgcctaaccgtaagatccacggtcctgcccacaaagagactatccgctctggccgccttaaagaggaaggttacacaatcagcaagaccgctctcatcgacttaaagcttactgaggacaaggaagagattaagggctattataacaaggagtcggaccgccttttgtacgaggctttaaagaagcagctgcagcgctacggtggcaaagctaaggaagcgttcaaggagccgtttcacaagcctaaagcagatggtaccccgggcccaatcgttaacaaggtaaagatcatggagaagagcactatgttaatcccggtgaacggcgggaagggtctcgcgtcaaacggcaacatggttcgcatcgacgtctttcgcgccgaggagaaaggtaagaagaaatattacttcatcccggtttatgttgctgacactgttaaggaagagcttccgaaccgtgcggtcttggcccacaaaccatacgaagcctggaaaattatgaaggaagaaaacttcatcttctccctctacccgaacgaccttatcttcgtcgacgccggtaaggaaatcccgttcaaagccgcactgaagggtagcacccttgacccggaaaagaaagcatcgcgtttcctgatgtactacaaaggggccgacatcgctaccggtagtattagtggcgtgaaccacgacgaaacctacaaagcacgcggcgtaggtattcagtcactgcgcgagattaagaaatgttgcattgacgtgctgggcaacatcagcttcgcttccaaagagaagcgccaaacgttccgt

SEQ ID NO: 105 - DNA, 7579 bp, synthetic construct
  source 1..7579: mol_type = other DNA
  misc_feature 1..7579: note = Category: plasmid
  misc_feature 1..7579: note = Description: pAL3 plasmid
ctcgagcaccaccaccaccaccactgataacaaagcccgaaaggaagctgagttggctgctgccaccgctgagcaataactagcataaccccttggggcctctaaacgggtcttgaggggttttttgctgaaaggaggaactatatccggattggcgaatgggacgcgccctgtagcggcgcattaagcgcggcgggtgtggtggttacgcgcagcgtgaccgctacacttgccagcgccctagcgcccgctcctttcgctttcttcccttcctttctcgccacgttcgccggctttccccgtcaagctctaaatcgggggctccctttagggttccgatttagtgctttacggcacctcgaccccaaaaaacttgattagggtgatggttcacgtagtgggccatcgccctgatagacggtttttcgccctttgacgttggagtccacgttctttaatagtggactcttgttccaaactggaacaacactcaaccctatctcggtctattcttttgatttataagggattttgccgatttcggcctattggttaaaaaatgagctgatttaacaaaaatttaacgcgaattttaacaaaatattaacgtttacaatttcaggtggcacttttcggggaaatgtgcgcggaacccctatttgtttatttttctaaatacattcaaatatgtatccgctcatgagacaataaccctgataaatgcttcaataatattgaaaaaggaagagtatgagtattcaacatttccgtgtcgcccttattcccttttttgcggcattttgccttcctgtttttgctcacccagaaacgctggtgaaagtaaaagatgctgaagatcagttgggtgcacgagtgggttacatcgaactggatctcaacagcggtaagatccttgagagttttcgccccgaagaacgttttccaatgatgagcacttttaaagttctgctatgtggcgcggtattatcccgtattgacgccgggcaagagcaactcggtcgccgcatacactattctcagaatgacttggttgagtactcaccagtcacagaaaagcatcttacggatggcatgacagtaagagaattatgcagtgctgccataaccatgagtgataacactgcggccaacttacttctgacaacgatcggaggaccgaaggagctaaccgcttttttgcacaacatgggggatcatgtaactcgccttgatcgttgggaaccggagctgaatgaagccataccaaacgacgagcgtgacaccacgatgcctgcagcaatggcaacaacgttgcgcaaactattaactggcgaactacttactctagcttcccggcaacaattaatagactggatggaggcggataaagttgcaggaccacttctgcgctcggcccttccggctggctggtttattgctgataaatctggagccggtgagcgtgggtctcgcggtatcattgcagcactggggccagatggtaagccctcccgtatcgtagttatctacacgacggggagtcaggcaactatggatgaacgaaatagacagatcgctgagataggtgcctcactgattaagcattggtaactgtcagaccaagtttactcatatatactttagattgatttaaaacttcatttttaatttaaaaggatctaggtgaagatcctttttgataatctcatgaccaaaatcccttaacgtgagttttcgttccactgagcgtcagaccccgtagaaaagatcaaaggatcttcttgagatcctttttttctgcgcgtaatctgctgcttgcaaacaaaaaaaccaccgctaccagcggtggtttgtttgccggatcaagagctaccaactctttttccgaaggtaactggcttcagcagagcgcagataccaaatactgtccttctagtgtagccgtagttaggccaccacttcaagaactctgtagcaccgcctacatacctcgctctgctaatcctgttaccagtggctgctgccagtggcgataagtcgtgtcttaccgggttggactcaagacgatagttaccggataaggcgcagcggtcgggctgaacggggggttcgtgcacacagcccagcttggagcgaacgacctacaccgaactgagatacctacagcgtgagctatgagaaagcgccacgcttcccgaagggagaaaggcggacaggtatccggtaagcggcagggtcggaacaggagagcgcacgagggagcttccagggggaaacgcctggtatctttatagtcctgtcgggtttcgccacctctgacttgagcgtcgatttttgtgatgctcgtcaggggggcggagcctatggaaaaacgccagcaacgcggcctttttacggttcctggccttttgctggccttttgctcacatgttctttcctgcgttatcccctgattctgtggataaccgtattaccgcctttgagtgagctgataccgctcgccgcagccgaacgaccgagcgcagcgagtcagtgagcgaggaagcggaagagcgcctgatgcggtattttctccttacgcatctgtgcggtatttcacaccgcatatatggtgcactctcagtacaatctgctctgatgccgcatagttaagccagtatacactccgctatcgctacgtgactgggtcatggctgcgccccgacacccgccaacacccgctgacgcgccctgacgggcttgtctgctcccggcatccgcttacagacaagctgtgaccgtctccgggagctgcatgtgtcagaggttttcaccgtcatcaccgaaacgcgcgaggcagctgcggtaaagctcatcagcgtggtcgtgaagcgattcacagatgtctgcctgttcatccgcgtccagctcgttgagtttctccagaagcgttaatgtctggcttctgataaagcgggccatgttaagggcggttttttcctgtttggtcactgatgcctccgtgtaagggggatttctgttcatgggggtaatgataccgatgaaacgagagaggatgctcacgatacgggttactgatgatgaacatgcccggttactggaacgttgtgagggtaaacaactggcggtatggatgcggcgggaccagagaaaaatcactcagggtcaatgccagcgcttcgttaatacagatgtaggtgttccacagggtagccagcagcatcctgcgatgcagatccggaacataatggtgcagggcgctgacttccgcgtttccagactttacgaaacacggaaaccgaagaccattcatgttgttgctcaggtcgcagacgttttgcagcagcagtcgcttcacgttcgctcgcgtatcggtgattcattctgctaaccagtaaggcaaccccgccagcctagccgggtcctcaacgacaggagcacgatcatgcgcacccgtggggccgccatgccggcgataatggcctgcttctcgccgaaacgtttggtggcgggaccagtgacgaaggcttgagcgagggcgtgcaagattccgaataccgcaagcgacaggccgatcatcgtcgcgctccagcgaaagcggtcctcgccgaaaatgacccagagcgctgccggcacctgtcctacgagttgcatgataaagaagacagtcataagtgcggcgacgatagtcatgccccgcgcccaccggaaggagctgactgggttgaaggctctcaagggcatcggtcgagatcccggtgcctaatgagtgagctaacttacattaattgcgttgcgctcactgcccgctttccagtcgggaaacctgtcgtgccagctgcattaatgaatcggccaacgcgcggggagaggcggtttgcgtattgggcgccagggtggtttttcttttcaccagtgagacgggcaacagctgattgcccttcaccgcctggccctgagagagttgcagcaagcggtccacgctggtttgccccagcaggcgaaaatcctgtttgatggtggttaacggcgggatataacatgagctgtcttcggtatcgtcgtatcccactaccgagatatccgcaccaacgcgcagcccggactcggtaatggcgcgcattgcgcccagcgccatctgatcgttggcaaccagcatcgcagtgggaacgatgccctcattcagcatttgcatggtttgttgaaaaccggacatggcactccagtcgccttcccgttccgctatcggctgaatttgattgcgagtgagatatttatgccagccagccagacgcagacgcgccgagacagaacttaatgggcccgctaacagcgcgatttgctggtgacccaatgcgaccagatgctccacgcccagtcgcgtaccgtcttcatgggagaaaataatactgttgatgggtgtctggtcagagacatcaagaaataacgccggaacattagtgcaggcagcttccacagcaatggcatcctggtcatccagcggatagttaatgatcagcccactgacgcgttgcgcgagaagattgtgcaccgccgctttacaggcttcgacgccgcttcgttctaccatcgacaccaccacgctggcacccagttgatcggcgcgagatttaatcgccgcgacaatttgcgacggcgcgtgcagggccagactggaggtggcaacgccaatcagcaacgactgtttgcccgccagttgttgtgccacgcggttgggaatgtaattcagctccgccatcgccgcttccactttttcccgcgttttcgcagaaacgtggctggcctggttcaccacgcgggaaacggtctgataagagacaccggcatactctgcgacatcgtataacgttactggtttcacattcaccaccctgaattgactctcttccgggcgctatcatgccataccgcgaaaggttttgcgccattcgatggtgtccgggatctcgacgctctcccttatgcgactcctgcattaggaagcagcccagtagtaggttgaggccgttgagcaccgccgccgcaaggaatggtgcatgcaaggagatggcgcccaacagtcccccggccacggggcctgccaccatacccacgccgaaacaagcgctcatgagcccgaagtggcgagcccgatcttccccatcggtgatgtcggcgatataggcgccagcaaccgcacctgtggcgccggtgatgccggccacgatgcgtccggcgtagaggatcgagatctcgatcccgcgaaattaatacgactcactataggaattgtgagcggataacaattcccctctagaaataattttgtttaactttaagaaggagatataccatgtcaaccgatatgaagaattatcgcattggcgtggacgtcggggatcgcagcgtaggcttggcagcgattgagttcgacgacgacgggctgccgattcagaaactggcattagttacctttcgtcatgacggtggcctcgacccaaccaagaacaaaacgcctatgtcgcgcaaagagacccgcgggatcgcgcgccgcaccatgcgtatgaatcgcgaacgcaaacgccgccttcgcaatttggacaacgtactggagaacttaggctatagcgtacctgagggacctgaaccggaaacttacgaagcctggacgagccgcgcactcttggcaagcattaaattagcatccgccgacgaattaaacgaacacctggttcgtgccgttcgccacatggcgcgccatcgcggctgggcaaacccctggtggagcctggatcaactcgaaaaggcatcacaagaacccagcgaaaccttcgaaatcatcttagcacgcgcacgcgaattattcggcgagaaagtaccagcgaaccccacccttgggatgctgggagcgctggcggcaaacaacgaagtgctgctccgcccacgtgacgagaagaaacgcaaaacgggatacgtacgtggaacgccgttgatgttcgcacaagtgcgccaaggcgatcaattagccgaattacgccgcatctgtgaagtacaaggcatcgaagatcaatatgaagcgctgcgtctgggtgtctttgatcacaaacatccgtacgtcccaaaagagcgcgttggcaaagatccgttgaacccgagcaccaaccgtaccatccgcgcaagccttgaattccaagaatttcgtatcttagacagtgttgccaatctccgcgttcgtatcggcagtcgcgccaaacgcgaactcaccgaagcggaatacgacgcagcggtagaatttctgatggattacgcggacaaagagcagcctagttgggcggacgtggcggaaaagatcggggtgccgggcaatcgtctggtagcccccgtcttagaagacgtacaacagaaaacagccccttacgatcgttcttctgcggcgttcgaaaaggctatggggaagaaaactgaagcccgccaatggtgggagtcgacggacgacgatcaactgcgcagccttctgatcgcgttcctggtggacgccactaatgacaccgaggaagctgccgcggaagccggattaagcgaattgtacaaatcctggcccgcggaagagcgcgaggctttaagcaatatcgacttcgaaaagggtcgcgtggcgtactcacaagaaacactgtccaagttaagtgaatatatgcacgaatatcgcgtcgggctgcatgaagcacgtaaagcagtatttggggttgacgacacgtggcgcccacctctggacaaattagaagagcctaccggacaacctgcagtagaccgtgtcctcaccatcttacgccgcttcgtattggactgcgaacgccaatggggtcgccctcgtgccatcaccgtagagcacactcgcactggtcttatgggcccgactcaacgccaaaagatcttgaacgaacaaaagaagaatcgcgcagacaacgaacgcatccgtgacgaactgcgcgaaagcggagttgacaacccaagtcgtgctgaggtgcgccgtcacttaatcgttcaagaacaagaatgccaatgtctgtattgtggtaccatgatcacaactaccaccagcgaactcgaccacatcgtaccacgcgcaggcggtggcagcagccgccgcgaaaacttggccgccgtatgtcgcgcctgcaacgcaaagaagaaacgcgagttgttttacgcctgggcgggaccggtcaaatcccaagaaacaatcgaacgcgtgcgtcaactgaaagcattcaaagactcaaagaaagctaagatgtttaagaaccaaatccgccgcctgaaccaaacagaagcggacgaacctatcgacgaacgctctctcgcgagcaccagctacgctgccgttgccgtccgcgaacgcttagagcaacatttcaacgaaggactggccctcgatgacaaatcacgtgtcgttttagacgtgtatgcgggcgcggtcacccgcgaaagtcgtcgcgccggcggcatcgatgaacgcatcctgttgcgtggcgaacgtgacaagaatcgcttcgacgttcgtcaccatgccgtggacgcg

SEQ ID NO: 106 - DNA, 2356 bp, synthetic construct
  source 1..2356: mol_type = other DNA
  misc_feature 1..2356: note = Category: plasmid
  misc_feature 1..2356: note = Description: PAM library U67/U40 plasmid
aatttaagccagccccgacacccgccaacacccgctgacgcgccctgacgggcttgtctgctcccggcatccgcttacagacaagctgtgaccgtctccgggagctgcatgtgtcagaggttttcaccgtcatcaccgaaacgcgcgagacgaaagggcctcgtgatacgcctatttttataggttaatgtcatgataataatggtttcttagacgtcaggtggcacttttcggggaaatgtgcgcggaacccctatttgtttatttttctaaatacattcaaatatgtatccgctcatgagacaataaccctgataaatgcttcaataatattgaaaaaggaagagtatgagccatattcaacgggaaacgtcttgctctaggccgcgattaaattccaacatggatgctgatttatatgggtataaatgggctcgcgataatgtcgggcaatcaggtgcgacaatctatcgattgtatgggaagcccgatgcgccagagttgtttctgaaacatggcaaaggtagcgttgccaatgatgttacagatgagatggtcagactaaactggctgacggaatttatgcctcttccgaccatcaagcattttatccgtactcctgatgatgcatggttactcaccactgcgatccccgggaaaacagcattccaggtattagaagaatatcctgattcaggtgaaaatattgttgatgcgctggcagtgttcctgcgccggttgcattcgattcctgtttgtaattgtccttttaacagcgatcgcgtatttcgtctcgctcaggcgcaatcacgaatgaataacggtttggttgatgcgagtgattttgatgacgagcgtaatggctggcctgttgaacaagtctggaaagaaatgcataaacttttgccattctcaccggattcagtcgtcactcatggtgatttctcacttgataaccttatttttgacgaggggaaattaataggttgtattgatgttggacgagtcggaatcgcagaccgataccaggatcttgccatcctatggaactgcctcggtgagttttctccttcattacagaaacggctttttcaaaaatatggtattgataatcctgatatgaataaattgcagtttcatttgatgctcgatgagtttttctaactgtcagaccaagtttactcatatatactttagattgatttaaaacttcatttttaatttaaaaggatctaggtgaagatcctttttgataatctcatgaccaaaatcccttaacgtgagttttcgttccactgagcgtcagaccccgtagaaaagatcaaaggatcttcttgagatcctttttttctgcgcgtaatctgctgcttgcaaacaaaaaaaccaccgctaccagcggtggtttgtttgccggatcaagagctaccaactctttttccgaaggtaactggcttcagcagagcgcagataccaaatactgttcttctagtgtagccgtagttaggccaccacttcaagaactctgtagcaccgcctacatacctcgctctgctaatcctgttaccagtggctgctgccagtggcgataagtcgtgtcttaccgggttggactcaagacgatagttaccggataaggcgcagcggtcgggctgaacggggggttcgtgcacacagcccagcttggagcgaacgacctacaccgaactgagatacctacagcgtgagctatgagaaagcgccacgcttcccgaagggagaaaggcggacaggtatccggtaagcggcagggtcggaacaggagagcgcacgagggagcttccagggggaaacgcctggtatctttatagtcctgtcgggtttcgccacctctgacttgagcgtcgatttttgtgatgctcgtcaggggggcggagcctatggaaaaacgccagcaacgcggcctttttacggttcctggccttttgctggccttttgctcacatgttctttcctgcgttatcccctgattctgtggataaccgtattaccgcctttgagtgagctgataccgctcgccgcagccgaacgaccgagcgcagcgagtcagtgagcgaggaagcggaagagcgcccaatacgcaaaccgcctctccccgcgcgttggccgattcattaatgcagctggcacgacaggtttcccgactggaaattcattaaaaattgaattgacattaacctataaaaataggcgtcgaggccctttcgtcttccgtgagccaccacgtcgcaagcctcgacnnnnnnnntggagatatcttgaaccttgcatccccggaagagagtcaatcccggaagagagtcaattcagggtggtgaat

SEQ ID NO: 107 - DNA, 2801 bp, synthetic construct
  source 1..2801: mol_type = other DNA
  misc_feature 1..2801: note = Category: plasmid
  misc_feature 1..2801: note = Description: pMG010 plasmid
gcggaacccctatttgtttatttttctaaatacattcaaatatgtatccgctcatgagacaataaccctgataaatgcttcaataatattgaaaaaggaagagtatgagtattcaacatttccgtgtcgcccttattcccttttttgcggcattttgccttcctgtttttgctcacccagaaacgctggtgaaagtaaaagatgctgaagatcagttgggtgcacgagtgggttacatcgaactggatctcaacagcggtaagatccttgagagttttcgccccgaagaacgttttccaatgatgagcacttttaaagttctgctatgtggcgcggtattatcccgtattgacgccgggcaagagcaactcggtcgccgcatacactattctcagaatgacttggttgagtactcaccagtcacagaaaagcatcttacggatggcatgacagtaagagaattatgcagtgctgccataaccatgagtgataacactgcggccaacttacttctgacaacgatcggaggaccgaaggagctaaccgcttttttgcacaacatgggggatcatgtaactcgccttgatcgttgggaaccggagctgaatgaagccataccaaacgacgagcgtgacaccacgatgcctgtagcaatggcaacaacgttgcgcaaactattaactggcgaactacttactctagcttcccggcaacaattaatagactggatggaggcggataaagttgcaggaccacttctgcgctcggcccttccggctggctggtttattgctgataaatctggagccggtgagcgtgggtctcgcggtatcattgcagcactggggccagatggtaagccctcccgtatcgtagttatctacacgacggggagtcaggcaactatggatgaacgaaatagacagatcgctgagataggtgcctcactgattaagcattggtaactgtcagaccaagtttactcatatatactttagattgatttaaaacttcatttttaatttaaaaggatctaggtgaagatcctttttgataatctcatgaccaaaatcccttaacgtgagttttcgttccactgagcgtcagaccccgtagaaaagatcaaaggatcttcttgagatcctttttttctgcgcgtaatctgctgcttgcaaacaaaaaaaccaccgctaccagcggtggtttgtttgccggatcaagagctaccaactctttttccgaaggtaactggcttcagcagagcgcagataccaaatactgttcttctagtgtagccgtagttaggccaccacttcaagaactctgtagcaccgcctacatacctcgctctgctaatcctgttaccagtggctgctgccagtggcgataagtcgtgtcttaccgggttggactcaagacgatagttaccggataaggcgcagcggtcgggctgaacggggggttcgtgcacacagcccagcttggagcgaacgacctacaccgaactgagatacctacagcgtgagctatgagaaagcgccacgcttcccgaagggagaaaggcggacaggtatccggtaagcggcagggtcggaacaggagagcgcacgagggagcttccagggggaaacgcctggtatctttatagtcctgtcgggtttcgccacctctgacttgagcgtcgatttttgtgatgctcgtcaggggggcggagcctatggaaaaacgccagcaacgcggcctttttacggttcctggccttttgctggccttttgctcacatgttctttcctgcgttatcccctgattctgtggataaccgtattaccgcctttgagtgagctgataccgctcgccgcagccgaacgaccgagcgcagcgagtcagtgagcgaggaagcggaagagcgcccaatacgcaaaccgcctctccccgcgcgttggccgattcattaatgcagctggcacgacaggtttcccgactggaaagcgggcagtgagcgcaacgcaattaatgtgagttagctcactcattaggcaccccaggctttacactttatgcttccggctcgtatgttgtgtggaattgtgagcggataacaatttcacacaggaaacagctatgaccatgattacgccaagcttgcatgcctgcaggtcgactctagaggatcccttgaagactaaaaaaaaaaaaaaaaaaaaaaaaaaaaaaaaaaaaaaaaaaaaaaaaaaaaaaaaaaaaaaaaaaaaaaaaaaaaaaaaaaaaaaaaaaaaaaaaaaaaaaaaaaaagaagagcaagtcccgaattcactggccgtcgttttacaacgtcgtgactgggaaaaccctggcgttacccaacttaatcgccttgcagcacatccccctttcgccagctggcgtaatagcgaagaggcccgcaccgatcgcccttcccaacagttgcgcagcctgaatggcgaatggcgcctgatgcggtattttctccttacgcatctgtgcggtatttcacaccgcatatggtgcactctcagtacaatctgctctgatgccgcatagttaagccagccccgacacccgccaacacccgctgacgcgccctgacgggcttgtctgctcccggcatccgcttacagacaagctgtgaccgtctccgggagctgcatgtgtcagaggttttcaccgtcatcaccgaaacgcgcgagacgaaagggcctcgtgatacgcctatttttataggttaatgtcatgataataatggtttcttagacgtcaggtggcacttttcggggaaatgt

SEQ ID NO: 108 - DNA, 3773 bp, synthetic construct
  source 1..3773: mol_type = other DNA
  misc_feature 1..3773: note = Category: MG3-6/3-4 containing 5'UTR, NLS, CDS, NLS,3'UTR, polyA tail
  misc_feature 1..3773: note = Description: MG3-6/3-4 mRNA
aaaagccagctccagcaggcgctgctcactcctccccatcctctccctctgtccctctgtccctctgaccctgcactgtcccagcaccatggcccccaagaagaagcggaaagttggcggcggaggcagctccacggatatgaagaactacaggatcggggtcgatgtgggagaccggtccgtgggactcgccgccatcgaatttgatgatgatggcttgcccatccaaaagctagctctcgtgactttccgacacgatggcgggctagatcctacaaagaataagactcccatgagccggaaggaaacaagaggtattgcaagacggacgatgaggatgaaccgggagagaaagcggcgtctgcgaaacctggataatgtccttgaaaatctgggatactcagtcccagaaggcccagagccagagacctatgaggcatggacctcacgggccctgctggcttccatcaagctggctagcgctgatgagctgaatgagcatttggtgcgggctgtgcgacatatggctaggcacagaggatgggcgaatccttggtggtccctcgaccagctggagaaagccagccaggagccttctgagacatttgagattatacttgctagggctcgagagctgtttggtgaaaaggttcctgccaatcctactctgggtatgctcggcgccttggcagccaataatgaggttctcctgcgaccgagagatgaaaagaagaggaagacaggctatgtgcgagggactcctctgatgtttgcgcaggtccgtcagggtgaccagcttgctgagctgcgacggatttgcgaggtgcagggaattgaggaccagtacgaggccctcagacttggggtgttcgaccataagcacccctatgtgcccaaggaaagagtggggaaggaccccctcaatccatctacaaatagaacgatacgggctagtttggagtttcaggagttcaggatactggattctgtagctaaccttagggtacggattgggtctcgtgcgaagcgggagctgactgaggcagagtatgatgccgctgttgagttcctaatggactatgctgataaggaacaaccatcctgggctgatgttgctgagaaaataggcgtccccgggaaccggttggtcgctcctgtgctcgaggatgtccagcaaaagaccgctccatatgaccgctccagcgctgctttcgagaaagcaatgggcaagaagaccgaggctcggcagtggtgggaatctacagatgatgaccagcttagatctctgcttattgcatttcttgtagatgcaacaaacgatacagaagaggcggcggctgaggcaggcctttcagagctatataagtcttggcctgcagaggaacgagaagcactaagtaacattgatttcgagaaaggtagggttgcctattctcaggagaccttgtcaaaactaagcgagtacatgcatgagtaccgtgtgggactccacgaggctaggaaggccgtgttcggcgtagatgatacctggcgaccgccgttggataagctggaagaacccactggccagccggctgtggatcgcgtgctaactatactgaggcggtttgtcctggattgtgagaggcagtggggtcgtccccgagcaataacagtggaacataccaggaccggcttgatgggacctacccagaggcagaaaattctgaatgagcagaagaagaaccgagctgataatgagcggattcgcgatgagctacgggagtctggcgtggataatccttctcgggccgaagtacggcggcatttgattgtacaggagcaggagtgtcagtgcttgtactgcggcactatgattacgaccacaacatcagagctggatcatattgtgcccagggctggggggggatcttcccgaagggagaatctggcagctgtttgcagagcttgtaatgccaagaagaagagagaactcttctatgcatgggctggcccagttaagtctcaggagaccattgagagagttagacagcttaaggcctttaaggattctaagaaggccaaaatgttcaagaatcagattaggcgattgaatcagaccgaggccgatgagcccattgatgagcggtccctggcatcaacaagttatgccgctgtggctgtgcgagagagactagaacagcactttaatgagggcctcgcgctggacgataagagccgggtggtgcttgatgtctacgctggggccgtgacacgggagtccaggcgggcaggtggtattgacgagaggattctgctgcggggagagcgagataagaaccgatttgatgtccgacatcacgcggtcgatgccgcagtcatgactttgcttaataggagcgtcgcactcacccttgagcagagaagccagctacgcagggctttctatgagctggagctagataaacttgaccgagatcagcttaagcccggcgaagattggcggaactttacgggcctctacgaggcaagccagaataagttctcagagtggaagaaggccgctacagtactcggggatctactcgctgaagccattgaggatgatgccattgctgtcgtgagccctctgcgattgaggccgcagaatggcagcgtccacgatgacacaattaatgcggttaagaagctgactttggggtccgcatggccagccgatgccgtgaagaggatagttgatccagagatatacttggcaatgaaggacgtcctaggaaaactaaaggagctacccgaggatagcgcaaggtccttggagctctctgatggcaggtacatagaggctgatgatgaggttctgttcttccctaagaaggcagcttccatactgactccaagaggcgctgcagagatagggaattctatacatcatgcccgcctttattcttggctgaccaagaagggagaattgaagttcggaatgctccgagtgtatggggcggagttcccgtggctcatgcgggaatccggttccagagatgttctccatatgcctattcatccaggaagtcagtcattccgcggcatgcaggatggggttcgaaaggcagtagagagcggcgaagctgtggagtttggatggattacccaggatgatgagttggagtttgatcctgaagactacattgctcacggcggcgatgatgagcttaataggctacttagagtaatgcctgagagaaggtggcgggtcgatggcttctataatgccggaacgcttaggattagaccagcacttctctctgcggagcagctgccttcagagctccagaagaaggtggcagataagactctgagtgacgttgagcttattctgctgcgcgccgtacagcgtgggttgtttgttgctataagtagctttctccctctggagagcctgaaggttataaggcggaataacttgggcttcccaagatggcggggaaacggaaatttgccaacatctttcgaggtcaggagcagtgctctcagggctctcggggttgaaggatctggcggaaaaagacctgccgccacaaagaaagccggacaggccaagaaaaagaagtgaccacacccccattcccccactccagatagaacttcagttatatctcacgtgtctggagttggatcccttgaagactaaaaaaaaaaaaaaaaaaaaaaaaaaaaaaaaaaaaaaaaaaaaaaaaaaaaaaaaaaaaaaaaaaaaaaaaaaaaaaaaaaaaaaaaaaaaaaaaaaaaaaaaaaaa

SEQ ID NO: 109 - protein, 1279 aa, synthetic construct
  REGION 1..1279: note = Category: MG29 chimeric effectors
  REGION 1..1279: note = Description: MG29-1_29-5 chimera
MFNNFIKKYSLQKTLRFELKPVGETADYIEDFKSEYLKDTVLKDEQRAKDYQEIKTLIDDYHREYIEECLREPVDKKTGEILDFTQDLEDAFSYYQKLKENPTENRVGWEKEQESLRKKLVTSFVGNDGLFKKEFITRDLPEWLQKKGLWGEYKDTVENFKKFTTYFSGFHENRKNMYTAEAQSTAIANRLMNDNLPKFFNNYLAYQTIKEKHPDLVFRLDDALLQAAGVEHLDEAFQPRYFSRLFAQSGITAFNELIGGRTTENGEKIQGLNEQINLYRQQNPEKAKGFPRFMPLFKQILSDRETHSFLPDAFENDKELLQALRDYVDAATSEEGMISQLNKAMNQFVTADLKRVYIKSAALTSLSQELFHFFGVISDAIAWYAEKRLSPKKAQESFLKQEVYAIEELNQAVVGYIDQLEDQSELQQLLVDLPDPQKPVSSFILTHWQKSQEPLQAVIAKVEPLFELEELSKNKRAPKHDKDQGGEGFQQVDAIKNMLDAFMEVSHAIKPLYLVKGRKAIDMPDVDTGFYADFAEAYSAYEQVTVSLYNKTRNHLSKKPYKRDKIKLNFEAPTLLNGWDLNKERANRSVLLLKNGNYYLAIMHPNHTDIFKKYMEMDNSDNYEKINYKLISDANRMLPRVFFSKKGIKTYDPPKSILELYKKGEHIKGPSFKLESLHRLIDYFKSVVSKYKADPGDQYGWEVFDFKFSPTSQYEDIGQFYKELEKQAYRVWFTPISSTYIEEAAKHGKLFLFQIYNKDFSPYAKGRPNLHTLYWKSLFEKENLQDVITKLNGEAEIFFRHHSIKKADTVIHKAGETIKNKNENNPKQESTFKHDIIKDRRYTVDKILFHVPITINFKNDKVVRFNDKINGLLAAQDDVHVIGIDRGERHLLYYTVVNGKGEVVEQGSLNQVATDQGYVVDYQQKLHAKEKERDQARKNWSTIENIKELKAGYLSQVVHKLAQLIVKHNAIVCLEDLNFGFKRGRFKVEKQVYQKFEKALIDKLNYLVFKERGATQAGGYLNAYQLAAPFESFEKLGKQTGILYYVRSDYTSKIDPATGFVDFLKPKYESMAKSKVFFESFERIQWNQAKGYFEFEFDYKKMCPSRKFGDYRTRWVVCTFGDTRYQNRRNKSSGQWETETIDVTAQLKALFAAYGITYNQEDNIKDAIAAVKYTKFYKQLYWLLRLTLSLRHSVTGTDEDFILSPVADENGVFFDSRKATDKQPKDADANGAYHIALKGLWNLQQIRQHDWNVEKPKKLNLAMKNEEWFGFAQKKKFRA

SEQ ID NO: 110 - protein, 1291 aa, synthetic construct
  REGION 1..1291: note = Category: MG29 chimeric effectors
  REGION 1..1291: note = Description: MG29-1_57-1 chimera
MFNNFIKKYSLQKTLRFELKPVGETADYIEDFKSEYLKDTVLKDEQRAKDYQEIKTLIDDYHREYIEECLREPVDKKTGEILDFTQDLEDAFSYYQKLKENPTENRVGWEKEQESLRKKLVTSFVGNDGLFKKEFITRDLPEWLQKKGLWGEYKDTVENFKKFTTYFSGFHENRKNMYTAEAQSTAIANRLMNDNLPKFFNNYLAYQTIKEKHPDLVFRLDDALLQAAGVEHLDEAFQPRYFSRLFAQSGITAFNELIGGRTTENGEKIQGLNEQINLYRQQNPEKAKGFPRFMPLFKQILSDRETHSFLPDAFENDKELLQALRDYVDAATSEEGMISQLNKAMNQFVTADLKRVYIKSAALTSLSQELFHFFGVISDAIAWYAEKRLSPKKAQESFLKQEVYAIEELNQAVVGYIDQLEDQSELQQLLVDLPDPQKPVSSFILTHWQKSQEPLQAVIAKVEPLFELEELSKNKRAPKHDKDQGGEGFQQVDAIKNMLDAFMEVSHAIKPLYLVKGRKAIDMPDVDTGFYADFAEAYSAYEQVTVSLYNKTRNHLSKKPQDDVKENKLKLNFGNSSLLGGWSDGQEKTKAATLLRCENDLYLCILKKRDVFDTSKDNPIYSSPSNASRLIIRNLKFQTLAGKGFLSEYGISYGEMSKDDPKKAIQCLQEIIKERYVKKYPLLEKFVTIKYADKSEFDAEINETLKECYVCEFVPINWNLIVEKQNNDELFLFKILCKDYKPNSIGKRDLQTIYWEDVLSDASNHQLCAGAEIFMRKPIANESPLTHRIGSKLVNKRDKDGNTIPDKFYREIYLYANGKTKVISKEAKKYIDEEKATIKDVNHEIIKDKRFYGDSQEPQYMFHCPIKLNYKTKVVRFNDKINGLLAAQDDVHVIGIDRGERHLLYYTVVNGKGEVVEQGSLNQVATDQGYVVDYQQKLHAKEKERDQARKNWSTIENIKELKAGYLSQVVHKLAQLIVKHNAIVCLEDLNFGFKRGRFKVEKQVYQKFEKALIDKLNYLVFKERGATQAGGYLNAYQLAAPFESFEKLGKQTGILYYVRSDYTSKIDPATGFVDFLKPKYESMAKSKVFFESFERIQWNQAKGYFEFEFDYKKMCPSRKFGDYRTRWVVCTFGDTRYQNRRNKSSGQWETETIDVTAQLKALFAAYGITYNQEDNIKDAIAAVKYTKFYKQLYWLLRLTLSLRHSVTGTDEDFILSPVADENGVFFDSRKATDKQPKDADANGAYHIALKGLWNLQQIRQHDWNVEKPKKLNLAMKNEEWFGFAQKKKFRA

SEQ ID NO: 111 - RNA, 39 nt, synthetic construct
  source 1..39: mol_type = other RNA
  misc_feature 1..39: note = Category: MG29 sgRNA
  misc_feature 1..39: note = Description: MG29-1 sgRNA
aatttctactgttgtagatnnnnnnnnnnnnnnnnnnnn

SEQ ID NO: 112 - RNA, 39 nt, synthetic construct
  source 1..39: mol_type = other RNA
  misc_feature 1..39: note = Category: MG29 sgRNA
  misc_feature 1..39: note = Description: MG29-5 sgRNA
aatttctacagttgtagatnnnnnnnnnnnnnnnnnnnn

SEQ ID NO: 113 - RNA, 39 nt, synthetic construct
  source 1..39: mol_type = other RNA
  misc_feature 1..39: note = Category: MG57 sgRNA
  misc_feature 1..39: note = Description: MG57-1 sgRNA
aatttctactatcgtagatnnnnnnnnnnnnnnnnnnnn

SEQ ID NO: 114-117 - skipped (4 entries)

SEQ ID NO: 118 - DNA, 35 bp, synthetic construct
  source 1..35: mol_type = other DNA
  misc_feature 1..35: note = Category: primer
  misc_feature 1..35: note = Description: LA179 primer used for PCR in PAM enrichment assay
gctcttccgatctnnnnngcagctggcacgacagg

SEQ ID NO: 119 - RNA, 110 nt, synthetic construct
  source 1..110: mol_type = other RNA
  misc_feature 1..110: note = Category: MG3-6/3-4 sgRNA targeting TRAC
  misc_feature 1..110: note = Description: MG3-6/3-4 TRAC A1
  modified_base 1..3: mod_base = OTHER; note = 2'O-Methyl ribonucleotide
  modified_base 1..3: mod_base = OTHER; note = Phosphorothioate linkage
  modified_base 108..110: mod_base = OTHER; note = 2'O-Methyl ribonucleotide
  modified_base 107..109: mod_base = OTHER; note = Phosphorothioate linkage
gccgtgtaccagctgagagactgttgagaatcgaaagattcttaataaggcatccttccgatgctgacttctcaccgtccgttttccaataggagcgggcggtatgtttt

SEQ ID NO: 120 - RNA, 110 nt, synthetic construct
  source 1..110: mol_type = other RNA
  misc_feature 1..110: note = Category: MG3-6/3-4 sgRNA targeting TRAC
  misc_feature 1..110: note = Description: MG3-6/3-4 TRAC B1
  modified_base 1..3: mod_base = OTHER; note = 2'O-Methyl ribonucleotide
  modified_base 1..3: mod_base = OTHER; note = Phosphorothioate linkage
  modified_base 108..110: mod_base = OTHER; note = 2'O-Methyl ribonucleotide
  modified_base 107..109: mod_base = OTHER; note = Phosphorothioate linkage
attcaccgattttgattctcaagttgagaatcgaaagattcttaataaggcatccttccgatgctgacttctcaccgtccgttttccaataggagcgggcggtatgtttt

SEQ ID NO: 121 - RNA, 110 nt, synthetic construct
  source 1..110: mol_type = other RNA
  misc_feature 1..110: note = Category: MG3-6/3-4 sgRNA targeting TRAC
  misc_feature 1..110: note = Description: MG3-6/3-4 TRAC C1
  modified_base 1..3: mod_base = OTHER; note = 2'O-Methyl ribonucleotide
  modified_base 1..3: mod_base = OTHER; note = Phosphorothioate linkage
  modified_base 108..110: mod_base = OTHER; note = 2'O-Methyl ribonucleotide
  modified_base 107..109: mod_base = OTHER; note = Phosphorothioate linkage
gattctgatgtgtatatcacaggttgagaatcgaaagattcttaataaggcatccttccgatgctgacttctcaccgtccgttttccaataggagcgggcggtatgtttt

SEQ ID NO: 122 - RNA, 110 nt, synthetic construct
  source 1..110: mol_type = other RNA
  misc_feature 1..110: note = Category: MG3-6/3-4 sgRNA targeting TRAC
  misc_feature 1..110: note = Description: MG3-6/3-4 TRAC D1
  modified_base 1..3: mod_base = OTHER; note = 2'O-Methyl ribonucleotide
  modified_base 1..3: mod_base = OTHER; note = Phosphorothioate linkage
  modified_base 108..110: mod_base = OTHER; note = 2'O-Methyl ribonucleotide
  modified_base 107..109: mod_base = OTHER; note = Phosphorothioate linkage
aacagtgctgtggcctggagcagttgagaatcgaaagattcttaataaggcatccttccgatgctgacttctcaccgtccgttttccaataggagcgggcggtatgtttt

SEQ ID NO: 123 - RNA, 110 nt, synthetic construct
  source 1..110: mol_type = other RNA
  misc_feature 1..110: note = Category: MG3-6/3-4 sgRNA targeting TRAC
  misc_feature 1..110: note = Description: MG3-6/3-4 TRAC E1
  modified_base 1..3: mod_base = OTHER; note = 2'O-Methyl ribonucleotide
  modified_base 1..3: mod_base = OTHER; note = Phosphorothioate linkage
  modified_base 108..110: mod_base = OTHER; note = 2'O-Methyl ribonucleotide
  modified_base 107..109: mod_base = OTHER; note = Phosphorothioate linkage
ggctggggaagaaggtgtcttcgttgagaatcgaaagattcttaataaggcatccttccgatgctgacttctcaccgtccgttttccaataggagcgggcggtatgtttt

SEQ ID NO: 124 - RNA, 110 nt, synthetic construct
  source 1..110: mol_type = other RNA
  misc_feature 1..110: note = Category: MG3-6/3-4 sgRNA targeting TRAC
  misc_feature 1..110: note = Description: MG3-6/3-4 TRAC F1
  modified_base 1..3: mod_base = OTHER; note = 2'O-Methyl ribonucleotide
  modified_base 1..3: mod_base = OTHER; note = Phosphorothioate linkage
  modified_base 108..110: mod_base = OTHER; note = 2'O-Methyl ribonucleotide
  modified_base 107..109: mod_base = OTHER; note = Phosphorothioate linkage
gttttgtctgtgatatacacatgttgagaatcgaaagattcttaataaggcatccttccgatgctgacttctcaccgtccgttttccaataggagcgggcggtatgtttt

SEQ ID NO: 125 - RNA, 110 nt, synthetic construct
  source 1..110: mol_type = other RNA
  misc_feature 1..110: note = Category: MG3-6/3-4 sgRNA targeting TRAC
  misc_feature 1..110: note = Description: MG3-6/3-4 TRAC G1
  modified_base 1..3: mod_base = OTHER; note = 2'O-Methyl ribonucleotide
  modified_base 1..3: mod_base = OTHER; note = Phosphorothioate linkage
  modified_base 108..110: mod_base = OTHER; note = 2'O-Methyl ribonucleotide
  modified_base 107..109: mod_base = OTHER; note = Phosphorothioate linkage
ttactttgtgacacatttgtttgttgagaatcgaaagattcttaataaggcatccttccgatgctgacttctcaccgtccgttttccaataggagcgggcggtatgtttt

SEQ ID NO: 126 - RNA, 110 nt, synthetic construct
  source 1..110: mol_type = other RNA
  misc_feature 1..110: note = Category: MG3-6/3-4 sgRNA targeting TRAC
  misc_feature 1..110: note = Description: MG3-6/3-4 TRAC H1
  modified_base 1..3: mod_base = OTHER; note = 2'O-Methyl ribonucleotide
  modified_base 1..3: mod_base = OTHER; note = Phosphorothioate linkage
  modified_base 108..110: mod_base = OTHER; note = 2'O-Methyl ribonucleotide
  modified_base 107..109: mod_base = OTHER; note = Phosphorothioate linkage
ttgtgacacatttgtttgagaagttgagaatcgaaagattcttaataaggcatccttccgatgctgacttctcaccgtccgttttccaataggagcgggcggtatgtttt

SEQ ID NO: 127 - RNA, 110 nt, synthetic construct
  source 1..110: mol_type = other RNA
  misc_feature 1..110: note = Category: MG3-6/3-4 sgRNA targeting TRAC
  misc_feature 1..110: note = Description: MG3-6/3-4 TRAC A2
  modified_base 1..3: mod_base = OTHER; note = 2'O-Methyl ribonucleotide
  modified_base 1..3: mod_base = OTHER; note = Phosphorothioate linkage
  modified_base 108..110: mod_base = OTHER; note = 2'O-Methyl ribonucleotide
  modified_base 107..109: mod_base = OTHER; note = Phosphorothioate linkage
tgtgacacatttgtttgagaatgttgagaatcgaaagattcttaataaggcatccttccgatgctgacttctcaccgtccgttttccaataggagcgggcggtatgtttt

SEQ ID NO: 128 - RNA, 110 nt, synthetic construct
  source 1..110: mol_type = other RNA
  misc_feature 1..110: note = Category: MG3-6/3-4 sgRNA targeting TRAC
  misc_feature 1..110: note = Description: MG3-6/3-4 TRAC B2
  modified_base 1..3: mod_base = OTHER; note = 2'O-Methyl ribonucleotide
  modified_base 1..3: mod_base = OTHER; note = Phosphorothioate linkage
  modified_base 108..110: mod_base = OTHER; note = 2'O-Methyl ribonucleotide
  modified_base 107..109: mod_base = OTHER; note = Phosphorothioate linkage
atttgtttgagaatcaaaatcggttgagaatcgaaagattcttaataaggcatccttccgatgctgacttctcaccgtccgttttccaataggagcgggcggtatgtttt

SEQ ID NO: 129 - RNA, 110 nt, synthetic construct
  source 1..110: mol_type = other RNA
  misc_feature 1..110: note = Category: MG3-6/3-4 sgRNA targeting TRAC
  misc_feature 1..110: note = Description: MG3-6/3-4 TRAC C2
  modified_base 1..3: mod_base = OTHER; note = 2'O-Methyl ribonucleotide
  modified_base 1..3: mod_base = OTHER; note = Phosphorothioate linkage
  modified_base 108..110: mod_base = OTHER; note = 2'O-Methyl ribonucleotide
  modified_base 107..109: mod_base = OTHER; note = Phosphorothioate linkage
ttcctgtgatgtcaagctggtcgttgagaatcgaaagattcttaataaggcatccttccgatgctgacttctcaccgtccgttttccaataggagcgggcggtatgtttt

SEQ ID NO: 130 - RNA, 110 nt, synthetic construct
  source 1..110: mol_type = other RNA
  misc_feature 1..110: note = Category: MG3-6/3-4 sgRNA targeting TRAC
  misc_feature 1..110: note = Description: MG3-6/3-4 TRAC D2
  modified_base 1..3: mod_base = OTHER; note = 2'O-Methyl ribonucleotide
  modified_base 1..3: mod_base = OTHER; note = Phosphorothioate linkage
  modified_base 108..110: mod_base = OTHER; note = 2'O-Methyl ribonucleotide
  modified_base 107..109: mod_base = OTHER; note = Phosphorothioate linkage
tcctgtgatgtcaagctggtcggttgagaatcgaaagattcttaataaggcatccttccgatgctgacttctcaccgtccgttttccaataggagcgggcggtatgtttt

SEQ ID NO: 131 - RNA, 110 nt, synthetic construct
  source 1..110: mol_type = other RNA
  misc_feature 1..110: note = Category: MG3-6/3-4 sgRNA targeting TRAC
  misc_feature 1..110: note = Description: MG3-6/3-4 TRAC E2
  modified_base 1..3: mod_base = OTHER; note = 2'O-Methyl ribonucleotide
  modified_base 1..3: mod_base = OTHER; note = Phosphorothioate linkage
  modified_base 108..110: mod_base = OTHER; note = 2'O-Methyl ribonucleotide
  modified_base 107..109: mod_base = OTHER; note = Phosphorothioate linkage
gtcaagctggtcgagaaaagctgttgagaatcgaaagattcttaataaggcatccttccgatgctgacttctcaccgtccgttttccaataggagcgggcggtatgtttt

SEQ ID NO: 132 - RNA, 110 nt, synthetic construct
  source 1..110: mol_type = other RNA
  misc_feature 1..110: note = Category: MG3-6/3-4 sgRNA targeting TRAC
  misc_feature 1..110: note = Description: MG3-6/3-4 TRAC F2
  modified_base 1..3: mod_base = OTHER; note = 2'O-Methyl ribonucleotide
  modified_base 1..3: mod_base = OTHER; note = Phosphorothioate linkage
  modified_base 108..110: mod_base = OTHER; note = 2'O-Methyl ribonucleotide
  modified_base 107..109: mod_base = OTHER; note = Phosphorothioate linkage
agcttgacatcacaggaactttgttgagaatcgaaagattcttaataaggcatccttccgatgctgacttctcaccgtccgttttccaataggagcgggcggtatgtttt

SEQ ID NO: 133 - RNA, 110 nt, synthetic construct
  source 1..110: mol_type = other RNA
  misc_feature 1..110: note = Category: MG3-6/3-4 sgRNA targeting TRAC
  misc_feature 1..110: note = Description: MG3-6/3-4 TRAC G2
  modified_base 1..3: mod_base = OTHER; note = 2'O-Methyl ribonucleotide
  modified_base 1..3: mod_base = OTHER; note = Phosphorothioate linkage
  modified_base 108..110: mod_base = OTHER; note = 2'O-Methyl ribonucleotide
  modified_base 107..109: mod_base = OTHER; note = Phosphorothioate linkage
gacatcacaggaactttctaaagttgagaatcgaaagattcttaataaggcatccttccgatgctgacttctcaccgtccgttttccaataggagcgggcggtatgtttt

SEQ ID NO: 134 - RNA, 110 nt, synthetic construct
  source 1..110: mol_type = other RNA
  misc_feature 1..110: note = Category: MG3-6/3-4 sgRNA targeting TRAC
  misc_feature 1..110: note = Description: MG3-6/3-4 TRAC H2
  modified_base 1..3: mod_base = OTHER; note = 2'O-Methyl ribonucleotide
  modified_base 1..3: mod_base = OTHER; note = Phosphorothioate linkage
  modified_base 108..110: mod_base = OTHER; note = 2'O-Methyl ribonucleotide
  modified_base 107..109: mod_base = OTHER; note = Phosphorothioate linkage
ttacagatacgaacctaaacttgttgagaatcgaaagattcttaataaggcatccttccgatgctgacttctcaccgtccgttttccaataggagcgggcggtatgtttt

SEQ ID NO: 135 - RNA, 110 nt, synthetic construct
  source 1..110: mol_type = other RNA
  misc_feature 1..110: note = Category: MG3-6/3-4 sgRNA targeting TRAC
  misc_feature 1..110: note = Description: MG3-6/3-4 TRAC A3
  modified_base 1..3: mod_base = OTHER; note = 2'O-Methyl ribonucleotide
  modified_base 1..3: mod_base = OTHER; note = Phosphorothioate linkage
  modified_base 108..110: mod_base = OTHER; note = 2'O-Methyl ribonucleotide
  modified_base 107..109: mod_base = OTHER; note = Phosphorothioate linkage
aaaacctgtcagtgattgggttgttgagaatcgaaagattcttaataaggcatccttccgatgctgacttctcaccgtccgttttccaataggagcgggcggtatgtttt

SEQ ID NO: 136 - RNA, 110 nt, synthetic construct
  source 1..110: mol_type = other RNA
  misc_feature 1..110: note = Category: MG3-6/3-4 sgRNA targeting TRAC
  misc_feature 1..110: note = Description: MG3-6/3-4 TRAC B3
  modified_base 1..3: mod_base = OTHER; note = 2'O-Methyl ribonucleotide
  modified_base 1..3: mod_base = OTHER; note = Phosphorothioate linkage
  modified_base 108..110: mod_base = OTHER; note = 2'O-Methyl ribonucleotide
  modified_base 107..109: mod_base = OTHER; note = Phosphorothioate linkage
gattgggttccgaatcctcctcgttgagaatcgaaagattcttaataaggcatccttccgatgctgacttctcaccgtccgttttccaataggagcgggcggtatgtttt

SEQ ID NO: 137 - RNA, 110 nt, synthetic construct
  source 1..110: mol_type = other RNA
  misc_feature 1..110: note = Category: MG3-6/3-4 sgRNA targeting TRAC
  misc_feature 1..110: note = Description: MG3-6/3-4 TRAC C3
  modified_base 1..3: mod_base = OTHER; note = 2'O-Methyl ribonucleotide
  modified_base 1..3: mod_base = OTHER; note = Phosphorothioate linkage
  modified_base 108..110: mod_base = OTHER; note = 2'O-Methyl ribonucleotide
  modified_base 107..109: mod_base = OTHER; note = Phosphorothioate linkage
ggaacccaatcactgacaggttgttgagaatcgaaagattcttaataaggcatccttccgatgctgacttctcaccgtccgttttccaataggagcgggcggtatgtttt

SEQ ID NO: 138 - RNA, 110 nt, synthetic construct
  source 1..110: mol_type = other RNA
  misc_feature 1..110: note = Category: MG3-6/3-4 sgRNA targeting TRAC
  misc_feature 1..110: note = Description: MG3-6/3-4 TRAC D3
  modified_base 1..3: mod_base = OTHER; note = 2'O-Methyl ribonucleotide
  modified_base 1..3: mod_base = OTHER; note = Phosphorothioate linkage
  modified_base 108..110: mod_base = OTHER; note = 2'O-Methyl ribonucleotide
  modified_base 107..109: mod_base = OTHER; note = Phosphorothioate linkage
ttgaaagtttaggttcgtatctgttgagaatcgaaagattcttaataaggcatccttccgatgctgacttctcaccgtccgttttccaataggagcgggcggtatgtttt

SEQ ID NO: 139 - DNA, 22 bp, Homo sapiens
  source 1..22: mol_type = genomic DNA
  misc_feature 1..22: note = Category: DNA sequence of TRAC target site
  misc_feature 1..22: note = Description: MG3-6/3-4 TRAC A1
gccgtgtaccagctgagagact

SEQ ID NO: 140 - DNA, 22 bp, Homo sapiens
  source 1..22: mol_type = genomic DNA
  misc_feature 1..22: note = Category: DNA sequence of TRAC target site
  misc_feature 1..22: note = Description: MG3-6/3-4 TRAC B1
attcaccgattttgattctcaa

SEQ ID NO: 141 - DNA, 22 bp, Homo sapiens
  source 1..22: mol_type = genomic DNA
  misc_feature 1..22: note = Category: DNA sequence of TRAC target site
  misc_feature 1..22: note = Description: MG3-6/3-4 TRAC C1
gattctgatgtgtatatcacag

SEQ ID NO: 142 - DNA, 22 bp, Homo sapiens
  source 1..22: mol_type = genomic DNA
  misc_feature 1..22: note = Category: DNA sequence of TRAC target site
  misc_feature 1..22: note = Description: MG3-6/3-4 TRAC D1
aacagtgctgtggcctggagca

SEQ ID NO: 143 - DNA, 22 bp, Homo sapiens
  source 1..22: mol_type = genomic DNA
  misc_feature 1..22: note = Category: DNA sequence of TRAC target site
  misc_feature 1..22: note = Description: MG3-6/3-4 TRAC E1
ggctggggaagaaggtgtcttc

SEQ ID NO: 144 - DNA, 22 bp, Homo sapiens
  source 1..22: mol_type = genomic DNA
  misc_feature 1..22: note = Category: DNA sequence of TRAC target site
  misc_feature 1..22: note = Description: MG3-6/3-4 TRAC F1
gttttgtctgtgatatacacat

SEQ ID NO: 145 - DNA, 22 bp, Homo sapiens
  source 1..22: mol_type = genomic DNA
  misc_feature 1..22: note = Category: DNA sequence of TRAC target site
  misc_feature 1..22: note = Description: MG3-6/3-4 TRAC G1
ttactttgtgacacatttgttt

SEQ ID NO: 146 - DNA, 22 bp, Homo sapiens
  source 1..22: mol_type = genomic DNA
  misc_feature 1..22: note = Category: DNA sequence of TRAC target site
  misc_feature 1..22: note = Description: MG3-6/3-4 TRAC H1
ttgtgacacatttgtttgagaa

SEQ ID NO: 147 - DNA, 22 bp, Homo sapiens
  source 1..22: mol_type = genomic DNA
  misc_feature 1..22: note = Category: DNA sequence of TRAC target site
  misc_feature 1..22: note = Description: MG3-6/3-4 TRAC A2
tgtgacacatttgtttgagaat

SEQ ID NO: 148 - DNA, 22 bp, Homo sapiens
  source 1..22: mol_type = genomic DNA
  misc_feature 1..22: note = Category: DNA sequence of TRAC target site
  misc_feature 1..22: note = Description: MG3-6/3-4 TRAC B2
atttgtttgagaatcaaaatcg

SEQ ID NO: 149 - DNA, 22 bp, Homo sapiens
  source 1..22: mol_type = genomic DNA
  misc_feature 1..22: note = Category: DNA sequence of TRAC target site
  misc_feature 1..22: note = Description: MG3-6/3-4 TRAC C2
ttcctgtgatgtcaagctggtc

SEQ ID NO: 150 - DNA, 22 bp, Homo sapiens
  source 1..22: mol_type = genomic DNA
  misc_feature 1..22: note = Category: DNA sequence of TRAC target site
  misc_feature 1..22: note = Description: MG3-6/3-4 TRAC D2
tcctgtgatgtcaagctggtcg

SEQ ID NO: 151 - DNA, 22 bp, Homo sapiens
  source 1..22: mol_type = genomic DNA
  misc_feature 1..22: note = Category: DNA sequence of TRAC target site
  misc_feature 1..22: note = Description: MG3-6/3-4 TRAC E2
gtcaagctggtcgagaaaagct

SEQ ID NO: 152 - DNA, 22 bp, Homo sapiens
  source 1..22: mol_type = genomic DNA
  misc_feature 1..22: note = Category: DNA sequence of TRAC target site
  misc_feature 1..22: note = Description: MG3-6/3-4 TRAC F2
agcttgacatcacaggaacttt

SEQ ID NO: 153 - DNA, 22 bp, Homo sapiens
  source 1..22: mol_type = genomic DNA
  misc_feature 1..22: note = Category: DNA sequence of TRAC target site
  misc_feature 1..22: note = Description: MG3-6/3-4 TRAC G2
gacatcacaggaactttctaaa

SEQ ID NO: 154 - DNA, 22 bp, Homo sapiens
  source 1..22: mol_type = genomic DNA
  misc_feature 1..22: note = Category: DNA sequence of TRAC target site
  misc_feature 1..22: note = Description: MG3-6/3-4 TRAC H2
ttacagatacgaacctaaactt

SEQ ID NO: 155 - DNA, 22 bp, Homo sapiens
  source 1..22: mol_type = genomic DNA
  misc_feature 1..22: note = Category: DNA sequence of TRAC target site
  misc_feature 1..22: note = Description: MG3-6/3-4 TRAC A3
aaaacctgtcagtgattgggtt

SEQ ID NO: 156 - DNA, 22 bp, Homo sapiens
  source 1..22: mol_type = genomic DNA
  misc_feature 1..22: note = Category: DNA sequence of TRAC target site
  misc_feature 1..22: note = Description: MG3-6/3-4 TRAC B3
gattgggttccgaatcctcctc

SEQ ID NO: 157 - DNA, 22 bp, Homo sapiens
  source 1..22: mol_type = genomic DNA
  misc_feature 1..22: note = Category: DNA sequence of TRAC target site
  misc_feature 1..22: note = Description: MG3-6/3-4 TRAC C3
ggaacccaatcactgacaggtt

SEQ ID NO: 158 - DNA, 22 bp, Homo sapiens
  source 1..22: mol_type = genomic DNA
  misc_feature 1..22: note = Category: DNA sequence of TRAC target site
  misc_feature 1..22: note = Description: MG3-6/3-4 TRAC D3
ttgaaagtttaggttcgtatct

SEQ ID NO: 159 - RNA, 110 nt, synthetic construct
  source 1..110: mol_type = other RNA
  misc_feature 1..110: note = Category: MG3-6/3-4 sgRNA targeting B2M
  misc_feature 1..110: note = Description: MG3-6/3-4 B2M A1
  modified_base 1..3: mod_base = OTHER; note = 2'O-Methyl ribonucleotide
  modified_base 1..3: mod_base = OTHER; note = Phosphorothioate linkage
  modified_base 108..110: mod_base = OTHER; note = 2'O-Methyl ribonucleotide
  modified_base 107..109: mod_base = OTHER; note = Phosphorothioate linkage
tcacgctggatagcctccaggcgttgagaatcgaaagattcttaataaggcatccttccgatgctgacttctcaccgtccgttttccaataggagcgggcggtatgtttt

SEQ ID NO: 160 - RNA, 110 nt, synthetic construct
  source 1..110: mol_type = other RNA
  misc_feature 1..110: note = Category: MG3-6/3-4 sgRNA targeting B2M
  misc_feature 1..110: note = Description: MG3-6/3-4 B2M B1
  modified_base 1..3: mod_base = OTHER; note = 2'O-Methyl ribonucleotide
  modified_base 1..3: mod_base = OTHER; note = Phosphorothioate linkage
  modified_base 108..110: mod_base = OTHER; note = 2'O-Methyl ribonucleotide
  modified_base 107..109: mod_base = OTHER; note = Phosphorothioate linkage
ggtttactcacgtcatccagcagttgagaatcgaaagattcttaataaggcatccttccgatgctgacttctcaccgtccgttttccaataggagcgggcggtatgtttt

SEQ ID NO: 161 - RNA, 110 nt, synthetic construct
  source 1..110: mol_type = other RNA
  misc_feature 1..110: note = Category: MG3-6/3-4 sgRNA targeting B2M
  misc_feature 1..110: note = Description: MG3-6/3-4 B2M C1
  modified_base 1..3: mod_base = OTHER; note = 2'O-Methyl ribonucleotide
  modified_base 1..3: mod_base = OTHER; note = Phosphorothioate linkage
  modified_base 108..110: mod_base = OTHER; note = 2'O-Methyl ribonucleotide
  modified_base 107..109: mod_base = OTHER; note = Phosphorothioate linkage
actcacgtcatccagcagagaagttgagaatcgaaagattcttaataaggcatccttccgatgctgacttctcaccgtccgttttccaataggagcgggcggtatgtttt

SEQ ID NO: 162 - RNA, 110 nt, synthetic construct
  source 1..110: mol_type = other RNA
  modified_base 1..3: mod_base = OTHER; note = 2'O-Methyl ribonucleotide
  modified_base 1..3: mod_base = OTHER; note = Phosphorothioate linkage
  modified_base 108..110: mod_base = OTHER; note = 2'O-Methyl ribonucleotide
  modified_base 107..109: mod_base = OTHER; note = Phosphorothioate linkage
tcatccagcagagaatggaaaggttgagaatcgaaagattcttaataaggcatccttccgatgctgacttctcaccgtccgttttccaataggagcgggcggtatgtttt

SEQ ID NO: 163 - RNA, 110 nt, synthetic construct
  source 1..110: mol_type = other RNA
  misc_feature 1..110: note = Category: MG3-6/3-4 sgRNA targeting B2M
  misc_feature 1..110: note = Description: MG3-6/3-4 B2M D1
  modified_base 1..3: mod_base = OTHER; note = 2'O-Methyl ribonucleotide
  modified_base 1..3: mod_base = OTHER; note = Phosphorothioate linkage
  modified_base 108..110: mod_base = OTHER; note = 2'O-Methyl ribonucleotide
  modified_base 107..109: mod_base = OTHER; note = Phosphorothioate linkage
agagaatggaaagtcaaatttcgttgagaatcgaaagattcttaataaggcatccttccgatgctgacttctcaccgtccgttttccaataggagcgggcggtatgtttt

SEQ ID NO: 164 - RNA, 110 nt, synthetic construct
  source 1..110: mol_type = other RNA
  misc_feature 1..110: note = Category: MG3-6/3-4 sgRNA targeting B2M
  misc_feature 1..110: note = Description: MG3-6/3-4 B2M E1
  modified_base 1..3: mod_base = OTHER; note = 2'O-Methyl ribonucleotide
  modified_base 1..3: mod_base = OTHER; note = Phosphorothioate linkage
  modified_base 108..110: mod_base = OTHER; note = 2'O-Methyl ribonucleotide
  modified_base 107..109: mod_base = OTHER; note = Phosphorothioate linkage
cgacattgaagttgacttactggttgagaatcgaaagattcttaataaggcatccttccgatgctgacttctcaccgtccgttttccaataggagcgggcggtatgtttt

SEQ ID NO: 165 - RNA, 110 nt, synthetic construct
  source 1..110: mol_type = other RNA
  misc_feature 1..110: note = Category: MG3-6/3-4 sgRNA targeting B2M
  misc_feature 1..110: note = Description: MG3-6/3-4B2M G1
  modified_base 1..3: mod_base = OTHER; note = 2'O-Methyl ribonucleotide
  modified_base 1..3: mod_base = OTHER; note = Phosphorothioate linkage
  modified_base 108..110: mod_base = OTHER; note = 2'O-Methyl ribonucleotide
  modified_base 107..109: mod_base = OTHER; note = Phosphorothioate linkage
ttgacttactgaagaatggagagttgagaatcgaaagattcttaataaggcatccttccgatgctgacttctcaccgtccgttttccaataggagcgggcggtatgtttt

SEQ ID NO: 166 - RNA, 110 nt, synthetic construct
  source 1..110: mol_type = other RNA
  misc_feature 1..110: note = Category: MG3-6/3-4 sgRNA targeting B2M
  misc_feature 1..110: note = Description: MG3-6/3-4 B2M H1
  modified_base 1..3: mod_base = OTHER; note = 2'O-Methyl ribonucleotide
  modified_base 1..3: mod_base = OTHER; note = Phosphorothioate linkage
  modified_base 108..110: mod_base = OTHER; note = 2'O-Methyl ribonucleotide
  modified_base 107..109: mod_base = OTHER; note = Phosphorothioate linkage
ttactgaagaatggagagagaagttgagaatcgaaagattcttaataaggcatccttccgatgctgacttctcaccgtccgttttccaataggagcgggcggtatgtttt

SEQ ID NO: 167 - RNA, 110 nt, synthetic construct
  source 1..110: mol_type = other RNA
  misc_feature 1..110: note = Category: MG3-6/3-4 sgRNA targeting B2M
  misc_feature 1..110: note = Description: MG3-6/3-4 B2M A2
  modified_base 1..3: mod_base = OTHER; note = 2'O-Methyl ribonucleotide
  modified_base 1..3: mod_base = OTHER; note = Phosphorothioate linkage
  modified_base 108..110: mod_base = OTHER; note = 2'O-Methyl ribonucleotide
  modified_base 107..109: mod_base = OTHER; note = Phosphorothioate linkage
tactgaagaatggagagagaatgttgagaatcgaaagattcttaataaggcatccttccgatgctgacttctcaccgtccgttttccaataggagcgggcggtatgtttt

SEQ ID NO: 168 - RNA, 110 nt, synthetic construct
  source 1..110: mol_type = other RNA
  misc_feature 1..110: note = Category: MG3-6/3-4 sgRNA targeting B2M
  misc_feature 1..110: note = Description: MG3-6/3-4 B2M B2
  modified_base 1..3: mod_base = OTHER; note = 2'O-Methyl ribonucleotide
  modified_base 1..3: mod_base = OTHER; note = Phosphorothioate linkage
  modified_base 108..110: mod_base = OTHER; note = 2'O-Methyl ribonucleotide
  modified_base 107..109: mod_base = OTHER; note = Phosphorothioate linkage
actgaagaatggagagagaattgttgagaatcgaaagattcttaataaggcatccttccgatgctgacttctcaccgtccgttttccaataggagcgggcggtatgtttt

SEQ ID NO: 169 - RNA, 110 nt, synthetic construct
  source 1..110: mol_type = other RNA
  misc_feature 1..110: note = Category: MG3-6/3-4 sgRNA targeting B2M
  misc_feature 1..110: note = Description: MG3-6/3-4 B2M C2
  modified_base 1..3: mod_base = OTHER; note = 2'O-Methyl ribonucleotide
  modified_base 1..3: mod_base = OTHER; note = Phosphorothioate linkage
  modified_base 108..110: mod_base = OTHER; note = 2'O-Methyl ribonucleotide
  modified_base 107..109: mod_base = OTHER; note = Phosphorothioate linkage
tctttctatctcttgtactacagttgagaatcgaaagattcttaataaggcatccttccgatgctgacttctcaccgtccgttttccaataggagcgggcggtatgtttt

SEQ ID NO: 170 - RNA, 110 nt, synthetic construct
  source 1..110: mol_type = other RNA
  misc_feature 1..110: note = Category: MG3-6/3-4 sgRNA targeting B2M
  misc_feature 1..110: note = Description: MG3-6/3-4 B2M D2
  modified_base 1..3: mod_base = OTHER; note = 2'O-Methyl ribonucleotide
  modified_base 1..3: mod_base = OTHER; note = Phosphorothioate linkage
  modified_base 108..110: mod_base = OTHER; note = 2'O-Methyl ribonucleotide
  modified_base 107..109: mod_base = OTHER; note = Phosphorothioate linkage
tactacactgaattcacccccagttgagaatcgaaagattcttaataaggcatccttccgatgctgacttctcaccgtccgttttccaataggagcgggcggtatgtttt

SEQ ID NO: 171 - RNA, 110 nt, synthetic construct
  source 1..110: mol_type = other RNA
  misc_feature 1..110: note = Category: MG3-6/3-4 sgRNA targeting B2M
  misc_feature 1..110: note = Description: MG3-6/3-4 B2M E2
  modified_base 1..3: mod_base = OTHER; note = 2'O-Methyl ribonucleotide
  modified_base 1..3: mod_base = OTHER; note = Phosphorothioate linkage
  modified_base 108..110: mod_base = OTHER; note = 2'O-Methyl ribonucleotide
  modified_base 107..109: mod_base = OTHER; note = Phosphorothioate linkage
actacactgaattcacccccacgttgagaatcgaaagattcttaataaggcatccttccgatgctgacttctcaccgtccgttttccaataggagcgggcggtatgtttt

SEQ ID NO: 172 - RNA, 110 nt, synthetic construct
  source 1..110: mol_type = other RNA
  misc_feature 1..110: note = Category: MG3-6/3-4 sgRNA targeting B2M
  misc_feature 1..110: note = Description: MG3-6/3-4 B2M F2
  modified_base 1..3: mod_base = OTHER; note = 2'O-Methyl ribonucleotide
  modified_base 1..3: mod_base = OTHER; note = Phosphorothioate linkage
  modified_base 108..110: mod_base = OTHER; note = 2'O-Methyl ribonucleotide
  modified_base 107..109: mod_base = OTHER; note = Phosphorothioate linkage
ctacactgaattcacccccactgttgagaatcgaaagattcttaataaggcatccttccgatgctgacttctcaccgtccgttttccaataggagcgggcggtatgtttt

SEQ ID NO: 173 - RNA, 110 nt, synthetic construct
  source 1..110: mol_type = other RNA
  misc_feature 1..110: note = Category: MG3-6/3-4 sgRNA targeting B2M
  misc_feature 1..110: note = Description: MG3-6/3-4B2M G2
  modified_base 1..3: mod_base = OTHER; note = 2'O-Methyl ribonucleotide
  modified_base 1..3: mod_base = OTHER; note = Phosphorothioate linkage
  modified_base 108..110: mod_base = OTHER; note = 2'O-Methyl ribonucleotide
  modified_base 107..109: mod_base = OTHER; note = Phosphorothioate linkage
atactcatctttttcagtgggggttgagaatcgaaagattcttaataaggcatccttccgatgctgacttctcaccgtccgttttccaataggagcgggcggtatgtttt

SEQ ID NO: 174 - RNA, 110 nt, synthetic construct
  source 1..110: mol_type = other RNA
  misc_feature 1..110: note = Category: MG3-6/3-4 sgRNA targeting B2M
  misc_feature 1..110: note = Description: MG3-6/3-4 B2M H2
  modified_base 1..3: mod_base = OTHER; note = 2'O-Methyl ribonucleotide
  modified_base 1..3: mod_base = OTHER; note = Phosphorothioate linkage
  modified_base 108..110: mod_base = OTHER; note = 2'O-Methyl ribonucleotide
  modified_base 107..109: mod_base = OTHER; note = Phosphorothioate linkage
gaattcagtgtagtacaagagagttgagaatcgaaagattcttaataaggcatccttccgatgctgacttctcaccgtccgttttccaataggagcgggcggtatgtttt

SEQ ID NO: 175 - RNA, 110 nt, synthetic construct
  source 1..110: mol_type = other RNA
  misc_feature 1..110: note = Category: MG3-6/3-4 sgRNA targeting B2M
  misc_feature 1..110: note = Description: MG3-6/3-4 B2M A3
  modified_base 1..3: mod_base = OTHER; note = 2'O-Methyl ribonucleotide
  modified_base 1..3: mod_base = OTHER; note = Phosphorothioate linkage
  modified_base 108..110: mod_base = OTHER; note = 2'O-Methyl ribonucleotide
  modified_base 107..109: mod_base = OTHER; note = Phosphorothioate linkage
gagatagaaagaccagtccttggttgagaatcgaaagattcttaataaggcatccttccgatgctgacttctcaccgtccgttttccaataggagcgggcggtatgtttt

SEQ ID NO: 176 - RNA, 110 nt, synthetic construct
  source 1..110: mol_type = other RNA
  misc_feature 1..110: note = Category: MG3-6/3-4 sgRNA targeting B2M
  misc_feature 1..110: note = Description: MG3-6/3-4 B2M B3
  modified_base 1..3: mod_base = OTHER; note = 2'O-Methyl ribonucleotide
  modified_base 1..3: mod_base = OTHER; note = Phosphorothioate linkage
  modified_base 108..110: mod_base = OTHER; note = 2'O-Methyl ribonucleotide
  modified_base 107..109: mod_base = OTHER; note = Phosphorothioate linkage
cagtccttgctgaaagacaagtgttgagaatcgaaagattcttaataaggcatccttccgatgctgacttctcaccgtccgttttccaataggagcgggcggtatgtttt

SEQ ID NO: 177 - RNA, 110 nt, synthetic construct
  source 1..110: mol_type = other RNA
  misc_feature 1..110: note = Category: MG3-6/3-4 sgRNA targeting B2M
  misc_feature 1..110: note = Description: MG3-6/3-4 B2M C3
  modified_base 1..3: mod_base = OTHER; note = 2'O-Methyl ribonucleotide
  modified_base 1..3: mod_base = OTHER; note = Phosphorothioate linkage
  modified_base 108..110: mod_base = OTHER; note = 2'O-Methyl ribonucleotide
  modified_base 107..109: mod_base = OTHER; note = Phosphorothioate linkage
agtcaacttcaatgtcggatgggttgagaatcgaaagattcttaataaggcatccttccgatgctgacttctcaccgtccgttttccaataggagcgggcggtatgtttt

SEQ ID NO: 178 - RNA, 110 nt, synthetic construct
  source 1..110: mol_type = other RNA
  misc_feature 1..110: note = Category: MG3-6/3-4 sgRNA targeting B2M
  misc_feature 1..110: note = Description: MG3-6/3-4 B2M D3
  modified_base 1..3: mod_base = OTHER; note = 2'O-Methyl ribonucleotide
  modified_base 1..3: mod_base = OTHER; note = Phosphorothioate linkage
  modified_base 108..110: mod_base = OTHER; note = 2'O-Methyl ribonucleotide
  modified_base 107..109: mod_base = OTHER; note = Phosphorothioate linkage
aaacccagacacatagcaattcgttgagaatcgaaagattcttaataaggcatccttccgatgctgacttctcaccgtccgttttccaataggagcgggcggtatgtttt

SEQ ID NO: 179 - RNA, 110 nt, synthetic construct
  source 1..110: mol_type = other RNA
  misc_feature 1..110: note = Category: MG3-6/3-4 sgRNA targeting B2M
  misc_feature 1..110: note = Description: MG3-6/3-4 B2M E3
  modified_base 1..3: mod_base = OTHER; note = 2'O-Methyl ribonucleotide
  modified_base 1..3: mod_base = OTHER; note = Phosphorothioate linkage
  modified_base 108..110: mod_base = OTHER; note = 2'O-Methyl ribonucleotide
  modified_base 107..109: mod_base = OTHER; note = Phosphorothioate linkage
aacccagacacatagcaattcagttgagaatcgaaagattcttaataaggcatccttccgatgctgacttctcaccgtccgttttccaataggagcgggcggtatgtttt

SEQ ID NO: 180 - RNA, 110 nt, synthetic construct
  source 1..110: mol_type = other RNA
  misc_feature 1..110: note = Category: MG3-6/3-4 sgRNA targeting B2M
  misc_feature 1..110: note = Description: MG3-6/3-4 B2M F3
  modified_base 1..3: mod_base = OTHER; note = 2'O-Methyl ribonucleotide
  modified_base 1..3: mod_base = OTHER; note = Phosphorothioate linkage
  modified_base 108..110: mod_base = OTHER; note = 2'O-Methyl ribonucleotide
  modified_base 107..109: mod_base = OTHER; note = Phosphorothioate linkage
ctgctggatgacgtgagtaaacgttgagaatcgaaagattcttaataaggcatccttccgatgctgacttctcaccgtccgttttccaataggagcgggcggtatgtttt

SEQ ID NO: 181 - RNA, 110 nt, synthetic construct
  source 1..110: mol_type = other RNA
  misc_feature 1..110: note = Category: MG3-6/3-4 sgRNA targeting B2M
  misc_feature 1..110: note = Description: MG3-6/3-4B2M G3
  modified_base 1..3: mod_base = OTHER; note = 2'O-Methyl ribonucleotide
  modified_base 1..3: mod_base = OTHER; note = Phosphorothioate linkage
  modified_base 108..110: mod_base = OTHER; note = 2'O-Methyl ribonucleotide
  modified_base 107..109: mod_base = OTHER; note = Phosphorothioate linkage
acctgaatctttggagtacctggttgagaatcgaaagattcttaataaggcatccttccgatgctgacttctcaccgtccgttttccaataggagcgggcggtatgtttt

SEQ ID NO: 182 - RNA, 110 nt, synthetic construct
  source 1..110: mol_type = other RNA
  misc_feature 1..110: note = Category: MG3-6/3-4 sgRNA targeting B2M
  misc_feature 1..110: note = Description: MG3-6/3-4 B2M H3
  modified_base 1..3: mod_base = OTHER; note = 2'O-Methyl ribonucleotide
  modified_base 1..3: mod_base = OTHER; note = Phosphorothioate linkage
  modified_base 108..110: mod_base = OTHER; note = 2'O-Methyl ribonucleotide
  modified_base 107..109: mod_base = OTHER; note = Phosphorothioate linkage
tgctgcttacatgtctcgatctgttgagaatcgaaagattcttaataaggcatccttccgatgctgacttctcaccgtccgttttccaataggagcgggcggtatgtttt

SEQ ID NO: 183 - RNA, 110 nt, synthetic construct
  source 1..110: mol_type = other RNA
  misc_feature 1..110: note = Category: MG3-6/3-4 sgRNA targeting B2M
  misc_feature 1..110: note = Description: MG3-6/3-4 B2M A4
  modified_base 1..3: mod_base = OTHER; note = 2'O-Methyl ribonucleotide
  modified_base 1..3: mod_base = OTHER; note = Phosphorothioate linkage
  modified_base 108..110: mod_base = OTHER; note = 2'O-Methyl ribonucleotide
  modified_base 107..109: mod_base = OTHER; note = Phosphorothioate linkage
gctgcttacatgtctcgatctagttgagaatcgaaagattcttaataaggcatccttccgatgctgacttctcaccgtccgttttccaataggagcgggcggtatgtttt

SEQ ID NO: 184 - RNA, 110 nt, synthetic construct
  source 1..110: mol_type = other RNA
  misc_feature 1..110: note = Category: MG3-6/3-4 sgRNA targeting B2M
  misc_feature 1..110: note = Description: MG3-6/3-4 B2M B4
  modified_base 1..3: mod_base = OTHER; note = 2'O-Methyl ribonucleotide
  modified_base 1..3: mod_base = OTHER; note = Phosphorothioate linkage
  modified_base 108..110: mod_base = OTHER; note = 2'O-Methyl ribonucleotide
  modified_base 107..109: mod_base = OTHER; note = Phosphorothioate linkage
ctgcttacatgtctcgatctatgttgagaatcgaaagattcttaataaggcatccttccgatgctgacttctcaccgtccgttttccaataggagcgggcggtatgtttt

SEQ ID NO: 185 - DNA, 22 bp, Homo sapiens
  source 1..22: mol_type = genomic DNA
  misc_feature 1..22: note = Category: DNA sequence of B2M target site
  misc_feature 1..22: note = Description: MG3-6/3-4 B2M A1
tcacgctggatagcctccaggc

SEQ ID NO: 186 - DNA, 22 bp, Homo sapiens
  source 1..22: mol_type = genomic DNA
  misc_feature 1..22: note = Category: DNA sequence of B2M target site
  misc_feature 1..22: note = Description: MG3-6/3-4 B2M B1
ggtttactcacgtcatccagca

SEQ ID NO: 187 - DNA, 22 bp, Homo sapiens
  source 1..22: mol_type = genomic DNA
  misc_feature 1..22: note = Category: DNA sequence of B2M target site
  misc_feature 1..22: note = Description: MG3-6/3-4 B2M C1
actcacgtcatccagcagagaa

SEQ ID NO: 188 - DNA, 22 bp, Homo sapiens
  source 1..22: mol_type = genomic DNA
  misc_feature 1..22: note = Category: DNA sequence of B2M target site
  misc_feature 1..22: note = Description: MG3-6/3-4 B2M D1
tcatccagcagagaatggaaag

SEQ ID NO: 189 - DNA, 22 bp, Homo sapiens
  source 1..22: mol_type = genomic DNA
  misc_feature 1..22: note = Category: DNA sequence of B2M target site
  misc_feature 1..22: note = Description: MG3-6/3-4 B2M E1
agagaatggaaagtcaaatttc

SEQ ID NO: 190 - DNA, 22 bp, Homo sapiens
  source 1..22: mol_type = genomic DNA
  misc_feature 1..22: note = Category: DNA sequence of B2M target site
  misc_feature 1..22: note = Description: MG3-6/3-4 B2M F1
cgacattgaagttgacttactg

SEQ ID NO: 191 - DNA, 22 bp, Homo sapiens
  source 1..22: mol_type = genomic DNA
  misc_feature 1..22: note = Category: DNA sequence of B2M target site
  misc_feature 1..22: note = Description: MG3-6/3-4B2M G1
ttgacttactgaagaatggaga

SEQ ID NO: 192 - DNA, 22 bp, Homo sapiens
  source 1..22: mol_type = genomic DNA
  misc_feature 1..22: note = Category: DNA sequence of B2M target site
  misc_feature 1..22: note = Description: MG3-6/3-4 B2M H1
ttactgaagaatggagagagaa

SEQ ID NO: 193 - DNA, 22 bp, Homo sapiens
  source 1..22: mol_type = genomic DNA
  misc_feature 1..22: note = Category: DNA sequence of B2M target site
  misc_feature 1..22: note = Description: MG3-6/3-4 B2M A2
tactgaagaatggagagagaat

SEQ ID NO: 194 - DNA, 22 bp, Homo sapiens
  source 1..22: mol_type = genomic DNA
  misc_feature 1..22: note = Category: DNA sequence of B2M target site
  misc_feature 1..22: note = Description: MG3-6/3-4 B2M B2
actgaagaatggagagagaatt

SEQ ID NO: 195 - DNA, 22 bp, Homo sapiens
  source 1..22: mol_type = genomic DNA
  misc_feature 1..22: note = Category: DNA sequence of B2M target site
  misc_feature 1..22: note = Description: MG3-6/3-4 B2M C2
tctttctatctcttgtactaca

SEQ ID NO: 196 - DNA, 22 bp, Homo sapiens
  source 1..22: mol_type = genomic DNA
  misc_feature 1..22: note = Category: DNA sequence of B2M target site
  misc_feature 1..22: note = Description: MG3-6/3-4 B2M D2
tactacactgaattcaccccca

SEQ ID NO: 197 - DNA, 22 bp, Homo sapiens
  source 1..22: mol_type = genomic DNA
  misc_feature 1..22: note = Category: DNA sequence of B2M target site
  misc_feature 1..22: note = Description: MG3-6/3-4 B2M E2
actacactgaattcacccccac

SEQ ID NO: 198 - DNA, 22 bp, Homo sapiens
  source 1..22: mol_type = genomic DNA
  misc_feature 1..22: note = Category: DNA sequence of B2M target site
  misc_feature 1..22: note = Description: MG3-6/3-4 B2M F2
ctacactgaattcacccccact

SEQ ID NO: 199 - DNA, 22 bp, Homo sapiens
  source 1..22: mol_type = genomic DNA
  misc_feature 1..22: note = Category: DNA sequence of B2M target site
  misc_feature 1..22: note = Description: MG3-6/3-4B2M G2
atactcatctttttcagtgggg

SEQ ID NO: 200 - DNA, 22 bp, Homo sapiens
  source 1..22: mol_type = genomic DNA
  misc_feature 1..22: note = Category: DNA sequence of B2M target site
  misc_feature 1..22: note = Description: MG3-6/3-4 B2M H2
gaattcagtgtagtacaagaga

SEQ ID NO: 201 - DNA, 22 bp, Homo sapiens
  source 1..22: mol_type = genomic DNA
  misc_feature 1..22: note = Category: DNA sequence of B2M target site
  misc_feature 1..22: note = Description: MG3-6/3-4 B2M A3
gagatagaaagaccagtccttg

SEQ ID NO: 202 - DNA, 22 bp, Homo sapiens
  source 1..22: mol_type = genomic DNA
  misc_feature 1..22: note = Category: DNA sequence of B2M target site
  misc_feature 1..22: note = Description: MG3-6/3-4 B2M B3
cagtccttgctgaaagacaagt

SEQ ID NO: 203 - DNA, 22 bp, Homo sapiens
  source 1..22: mol_type = genomic DNA
  misc_feature 1..22: note = Category: DNA sequence of B2M target site
  misc_feature 1..22: note = Description: MG3-6/3-4 B2M C3
agtcaacttcaatgtcggatgg

SEQ ID NO: 204 - DNA, 22 bp, Homo sapiens
  source 1..22: mol_type = genomic DNA
  misc_feature 1..22: note = Category: DNA sequence of B2M target site
  misc_feature 1..22: note = Description: MG3-6/3-4 B2M D3
aaacccagacacatagcaattc

SEQ ID NO: 205 - DNA, 22 bp, Homo sapiens
  source 1..22: mol_type = genomic DNA
  misc_feature 1..22: note = Category: DNA sequence of B2M target site
  misc_feature 1..22: note = Description: MG3-6/3-4 B2M E3
aacccagacacatagcaattca

SEQ ID NO: 206 - DNA, 22 bp, Homo sapiens
  source 1..22: mol_type = genomic DNA
  misc_feature 1..22: note = Category: DNA sequence of B2M target site
  misc_feature 1..22: note = Description: MG3-6/3-4 B2M F3
ctgctggatgacgtgagtaaac

SEQ ID NO: 207 - DNA, 22 bp, Homo sapiens
  source 1..22: mol_type = genomic DNA
  misc_feature 1..22: note = Category: DNA sequence of B2M target site
  misc_feature 1..22: note = Description: MG3-6/3-4B2M G3
acctgaatctttggagtacctg

SEQ ID NO: 208 - DNA, 22 bp, Homo sapiens
  source 1..22: mol_type = genomic DNA
  misc_feature 1..22: note = Category: DNA sequence of B2M target site
  misc_feature 1..22: note = Description: MG3-6/3-4 B2M H3
tgctgcttacatgtctcgatct

SEQ ID NO: 209 - DNA, 22 bp, Homo sapiens
  source 1..22: mol_type = genomic DNA
  misc_feature 1..22: note = Category: DNA sequence of B2M target site
  misc_feature 1..22: note = Description: MG3-6/3-4 B2M A4
gctgcttacatgtctcgatcta

SEQ ID NO: 210 - DNA, 22 bp, Homo sapiens
  source 1..22: mol_type = genomic DNA
  misc_feature 1..22: note = Category: DNA sequence of B2M target site
  misc_feature 1..22: note = Description: MG3-6/3-4 B2M B4
ctgcttacatgtctcgatctat

SEQ ID NO: 211 - RNA, 110 nt, synthetic construct
  source 1..110: mol_type = other RNA
  misc_feature 1..110: note = Category: MG3-6/3-4 sgRNA targeting TRBC1
  misc_feature 1..110: note = Description: MG3-6/3-4 TRBC1 A1
  modified_base 1..3: mod_base = OTHER; note = 2'O-Methyl ribonucleotide
  modified_base 1..3: mod_base = OTHER; note = Phosphorothioate linkage
  modified_base 108..110: mod_base = OTHER; note = 2'O-Methyl ribonucleotide
  modified_base 107..109: mod_base = OTHER; note = Phosphorothioate linkage
cagaagcagagatctcccacacgttgagaatcgaaagattcttaataaggcatccttccgatgctgacttctcaccgtccgttttccaataggagcgggcggtatgtttt

SEQ ID NO: 212 - RNA, 110 nt, synthetic construct
  source 1..110: mol_type = other RNA
  misc_feature 1..110: note = Category: MG3-6/3-4 sgRNA targeting TRBC1
  misc_feature 1..110: note = Description: MG3-6/3-4 TRBC1 B1
  modified_base 1..3: mod_base = OTHER; note = 2'O-Methyl ribonucleotide
  modified_base 1..3: mod_base = OTHER; note = Phosphorothioate linkage
  modified_base 108..110: mod_base = OTHER; note = 2'O-Methyl ribonucleotide
  modified_base 107..109: mod_base = OTHER; note = Phosphorothioate linkage
ccacgtggagctgagctggtgggttgagaatcgaaagattcttaataaggcatccttccgatgctgacttctcaccgtccgttttccaataggagcgggcggtatgtttt

SEQ ID NO: 213 - RNA, 110 nt, synthetic construct
  source 1..110: mol_type = other RNA
  misc_feature 1..110: note = Category: MG3-6/3-4 sgRNA targeting TRBC1
  misc_feature 1..110: note = Description: MG3-6/3-4 TRBC1 C1
  modified_base 1..3: mod_base = OTHER; note = 2'O-Methyl ribonucleotide
  modified_base 1..3: mod_base = OTHER; note = Phosphorothioate linkage
  modified_base 108..110: mod_base = OTHER; note = 2'O-Methyl ribonucleotide
  modified_base 107..109: mod_base = OTHER; note = Phosphorothioate linkage
agtccagttctacgggctctcggttgagaatcgaaagattcttaataaggcatccttccgatgctgacttctcaccgtccgttttccaataggagcgggcggtatgtttt

SEQ ID NO: 214 - RNA, 110 nt, synthetic construct
  source 1..110: mol_type = other RNA
  misc_feature 1..110: note = Category: MG3-6/3-4 sgRNA targeting TRBC1
  misc_feature 1..110: note = Description: MG3-6/3-4 TRBC1 D1
  modified_base 1..3: mod_base = OTHER; note = 2'O-Methyl ribonucleotide
  modified_base 1..3: mod_base = OTHER; note = Phosphorothioate linkage
  modified_base 108..110: mod_base = OTHER; note = 2'O-Methyl ribonucleotide
  modified_base 107..109: mod_base = OTHER; note = Phosphorothioate linkage
gattaggtgagaccagctaccagttgagaatcgaaagattcttaataaggcatccttccgatgctgacttctcaccgtccgttttccaataggagcgggcggtatgtttt

SEQ ID NO: 215 - RNA, 110 nt, synthetic construct
  source 1..110: mol_type = other RNA
  misc_feature 1..110: note = Category: MG3-6/3-4 sgRNA targeting TRBC1
  misc_feature 1..110: note = Description: MG3-6/3-4 TRBC1 E1
  modified_base 1..3: mod_base = OTHER; note = 2'O-Methyl ribonucleotide
  modified_base 1..3: mod_base = OTHER; note = Phosphorothioate linkage
  modified_base 108..110: mod_base = OTHER; note = 2'O-Methyl ribonucleotide
  modified_base 107..109: mod_base = OTHER; note = Phosphorothioate linkage
attaggtgagaccagctaccaggttgagaatcgaaagattcttaataaggcatccttccgatgctgacttctcaccgtccgttttccaataggagcgggcggtatgtttt

SEQ ID NO: 216 - RNA, 110 nt, synthetic construct
  source 1..110: mol_type = other RNA
  misc_feature 1..110: note = Category: MG3-6/3-4 sgRNA targeting TRBC1
  misc_feature 1..110: note = Description: MG3-6/3-4 TRBC1 F1
  modified_base 1..3: mod_base = OTHER; note = 2'O-Methyl ribonucleotide
  modified_base 1..3: mod_base = OTHER; note = Phosphorothioate linkage
  modified_base 108..110: mod_base = OTHER; note = 2'O-Methyl ribonucleotide
  modified_base 107..109: mod_base = OTHER; note = Phosphorothioate linkage
ttaggtgagaccagctaccagggttgagaatcgaaagattcttaataaggcatccttccgatgctgacttctcaccgtccgttttccaataggagcgggcggtatgtttt

SEQ ID NO: 217 - RNA, 110 nt, synthetic construct
  source 1..110: mol_type = other RNA
  misc_feature 1..110: note = Category: MG3-6/3-4 sgRNA targeting TRBC1
  misc_feature 1..110: note = Description: MG3-6/3-4 TRBC1 G1
  modified_base 1..3: mod_base = OTHER; note = 2'O-Methyl ribonucleotide
  modified_base 1..3: mod_base = OTHER; note = Phosphorothioate linkage
  modified_base 108..110: mod_base = OTHER; note = 2'O-Methyl ribonucleotide
  modified_base 107..109: mod_base = OTHER; note = Phosphorothioate linkage
tgagaccagctaccagggaaaagttgagaatcgaaagattcttaataaggcatccttccgatgctgacttctcaccgtccgttttccaataggagcgggcggtatgtttt

SEQ ID NO: 218 - RNA, 110 nt, synthetic construct
  source 1..110: mol_type = other RNA
  misc_feature 1..110: note = Category: MG3-6/3-4 sgRNA targeting TRBC1
  misc_feature 1..110: note = Description: MG3-6/3-4 TRBC1 H1
  modified_base 1..3: mod_base = OTHER; note = 2'O-Methyl ribonucleotide
  modified_base 1..3: mod_base = OTHER; note = Phosphorothioate linkage
  modified_base 108..110: mod_base = OTHER; note = 2'O-Methyl ribonucleotide
  modified_base 107..109: mod_base = OTHER; note = Phosphorothioate linkage
caggtagcagacaagactagatgttgagaatcgaaagattcttaataaggcatccttccgatgctgacttctcaccgtccgttttccaataggagcgggcggtatgtttt

SEQ ID NO: 219 - RNA, 110 nt, synthetic construct
  source 1..110: mol_type = other RNA
  misc_feature 1..110: note = Category: MG3-6/3-4 sgRNA targeting TRBC1
  misc_feature 1..110: note = Description: MG3-6/3-4 TRBC1 A2
  modified_base 1..3: mod_base = OTHER; note = 2'O-Methyl ribonucleotide
  modified_base 1..3: mod_base = OTHER; note = Phosphorothioate linkage
  modified_base 108..110: mod_base = OTHER; note = 2'O-Methyl ribonucleotide
  modified_base 107..109: mod_base = OTHER; note = Phosphorothioate linkage
aggtagcagacaagactagatcgttgagaatcgaaagattcttaataaggcatccttccgatgctgacttctcaccgtccgttttccaataggagcgggcggtatgtttt

SEQ ID NO: 220 - RNA, 110 nt, synthetic construct
  source 1..110: mol_type = other RNA
  misc_feature 1..110: note = Category: MG3-6/3-4 sgRNA targeting TRBC1
  misc_feature 1..110: note = Description: MG3-6/3-4 TRBC1 B2
  modified_base 1..3: mod_base = OTHER; note = 2'O-Methyl ribonucleotide
  modified_base 1..3: mod_base = OTHER; note = Phosphorothioate linkage
  modified_base 108..110: mod_base = OTHER; note = 2'O-Methyl ribonucleotide
  modified_base 107..109: mod_base = OTHER; note = Phosphorothioate linkage
agcagacaagactagatccaaagttgagaatcgaaagattcttaataaggcatccttccgatgctgacttctcaccgtccgttttccaataggagcgggcggtatgtttt

SEQ ID NO: 221 - RNA, 110 nt, synthetic construct
  source 1..110: mol_type = other RNA
  misc_feature 1..110: note = Category: MG3-6/3-4 sgRNA targeting TRBC1
  misc_feature 1..110: note = Description: MG3-6/3-4 TRBC1 C2
  modified_base 1..3: mod_base = OTHER; note = 2'O-Methyl ribonucleotide
  modified_base 1..3: mod_base = OTHER; note = Phosphorothioate linkage
  modified_base 108..110: mod_base = OTHER; note = 2'O-Methyl ribonucleotide
  modified_base 107..109: mod_base = OTHER; note = Phosphorothioate linkage
ggaaccagcgcacaccatgaaggttgagaatcgaaagattcttaataaggcatccttccgatgctgacttctcaccgtccgttttccaataggagcgggcggtatgtttt

SEQ ID NO: 222 - RNA, 110 nt, synthetic construct
  source 1..110: mol_type = other RNA
  misc_feature 1..110: note = Category: MG3-6/3-4 sgRNA targeting TRBC1
  misc_feature 1..110: note = Description: MG3-6/3-4 TRBC1 D2
  modified_base 1..3: mod_base = OTHER; note = 2'O-Methyl ribonucleotide
  modified_base 1..3: mod_base = OTHER; note = Phosphorothioate linkage
  modified_base 108..110: mod_base = OTHER; note = 2'O-Methyl ribonucleotide
  modified_base 107..109: mod_base = OTHER; note = Phosphorothioate linkage
gtggctgacatctgcatggcaggttgagaatcgaaagattcttaataaggcatccttccgatgctgacttctcaccgtccgttttccaataggagcgggcggtatgtttt

SEQ ID NO: 223 - RNA, 110 nt, synthetic construct
  source 1..110: mol_type = other RNA
  misc_feature 1..110: note = Category: MG3-6/3-4 sgRNA targeting TRBC1
  misc_feature 1..110: note = Description: MG3-6/3-4 TRBC1 E2
  modified_base 1..3: mod_base = OTHER; note = 2'O-Methyl ribonucleotide
  modified_base 1..3: mod_base = OTHER; note = Phosphorothioate linkage
  modified_base 108..110: mod_base = OTHER; note = 2'O-Methyl ribonucleotide
  modified_base 107..109: mod_base = OTHER; note = Phosphorothioate linkage
ggcctgggagtctgtgccaactgttgagaatcgaaagattcttaataaggcatccttccgatgctgacttctcaccgtccgttttccaataggagcgggcggtatgtttt

SEQ ID NO: 224 - RNA, 110 nt, synthetic construct
  source 1..110: mol_type = other RNA
  misc_feature 1..110: note = Category: MG3-6/3-4 sgRNA targeting TRBC1
  misc_feature 1..110: note = Description: MG3-6/3-4 TRBC1 F2
  modified_base 1..3: mod_base = OTHER; note = 2'O-Methyl ribonucleotide
  modified_base 1..3: mod_base = OTHER; note = Phosphorothioate linkage
  modified_base 108..110: mod_base = OTHER; note = 2'O-Methyl ribonucleotide
  modified_base 107..109: mod_base = OTHER; note = Phosphorothioate linkage
ctgactttacttttaattgcctgttgagaatcgaaagattcttaataaggcatccttccgatgctgacttctcaccgtccgttttccaataggagcgggcggtatgtttt

SEQ ID NO: 225 - RNA, 110 nt, synthetic construct
  source 1..110: mol_type = other RNA
  misc_feature 1..110: note = Category: MG3-6/3-4 sgRNA targeting TRBC1
  misc_feature 1..110: note = Description: MG3-6/3-4 TRBC1 G2
  modified_base 1..3: mod_base = OTHER; note = 2'O-Methyl ribonucleotide
  modified_base 1..3: mod_base = OTHER; note = Phosphorothioate linkage
  modified_base 108..110: mod_base = OTHER; note = 2'O-Methyl ribonucleotide
  modified_base 107..109: mod_base = OTHER; note = Phosphorothioate linkage
tgactttacttttaattgcctagttgagaatcgaaagattcttaataaggcatccttccgatgctgacttctcaccgtccgttttccaataggagcgggcggtatgtttt

SEQ ID NO: 226 - RNA, 110 nt, synthetic construct
  source 1..110: mol_type = other RNA
  misc_feature 1..110: note = Category: MG3-6/3-4 sgRNA targeting TRBC1
  misc_feature 1..110: note = Description: MG3-6/3-4 TRBC1 H2
  modified_base 1..3: mod_base = OTHER; note = 2'O-Methyl ribonucleotide
  modified_base 1..3: mod_base = OTHER; note = Phosphorothioate linkage
  modified_base 108..110: mod_base = OTHER; note = 2'O-Methyl ribonucleotide
  modified_base 107..109: mod_base = OTHER; note = Phosphorothioate linkage
gactttacttttaattgcctatgttgagaatcgaaagattcttaataaggcatccttccgatgctgacttctcaccgtccgttttccaataggagcgggcggtatgtttt

SEQ ID NO: 227 - RNA, 110 nt, synthetic construct
  source 1..110: mol_type = other RNA
  misc_feature 1..110: note = Category: MG3-6/3-4 sgRNA targeting TRBC1
  misc_feature 1..110: note = Description: MG3-6/3-4 TRBC1 A3
  modified_base 1..3: mod_base = OTHER; note = 2'O-Methyl ribonucleotide
  modified_base 1..3: mod_base = OTHER; note = Phosphorothioate linkage
  modified_base 108..110: mod_base = OTHER; note = 2'O-Methyl ribonucleotide
  modified_base 107..109: mod_base = OTHER; note = Phosphorothioate linkage
gggaaggagaagctggagtcacgttgagaatcgaaagattcttaataaggcatccttccgatgctgacttctcaccgtccgttttccaataggagcgggcggtatgtttt

SEQ ID NO: 228 - RNA, 110 nt, synthetic construct
  source 1..110: mol_type = other RNA
  misc_feature 1..110: note = Category: MG3-6/3-4 sgRNA targeting TRBC1
  misc_feature 1..110: note = Description: MG3-6/3-4 TRBC1 B3
  modified_base 1..3: mod_base = OTHER; note = 2'O-Methyl ribonucleotide
  modified_base 1..3: mod_base = OTHER; note = Phosphorothioate linkage
  modified_base 108..110: mod_base = OTHER; note = 2'O-Methyl ribonucleotide
  modified_base 107..109: mod_base = OTHER; note = Phosphorothioate linkage
ggaaggagaagctggagtcaccgttgagaatcgaaagattcttaataaggcatccttccgatgctgacttctcaccgtccgttttccaataggagcgggcggtatgtttt

SEQ ID NO: 229 - RNA, 110 nt, synthetic construct
  source 1..110: mol_type = other RNA
  misc_feature 1..110: note = Category: MG3-6/3-4 sgRNA targeting TRBC1
  misc_feature 1..110: note = Description: MG3-6/3-4 TRBC1 C3
  modified_base 1..3: mod_base = OTHER; note = 2'O-Methyl ribonucleotide
  modified_base 1..3: mod_base = OTHER; note = Phosphorothioate linkage
  modified_base 108..110: mod_base = OTHER; note = 2'O-Methyl ribonucleotide
  modified_base 107..109: mod_base = OTHER; note = Phosphorothioate linkage
aactcctggctcttaataacccgttgagaatcgaaagattcttaataaggcatccttccgatgctgacttctcaccgtccgttttccaataggagcgggcggtatgtttt

SEQ ID NO: 230 - RNA, 110 nt, synthetic construct
  source 1..110: mol_type = other RNA
  misc_feature 1..110: note = Category: MG3-6/3-4 sgRNA targeting TRBC1
  misc_feature 1..110: note = Description: MG3-6/3-4 TRBC1 D3
  modified_base 1..3: mod_base = OTHER; note = 2'O-Methyl ribonucleotide
  modified_base 1..3: mod_base = OTHER; note = Phosphorothioate linkage
  modified_base 108..110: mod_base = OTHER; note = 2'O-Methyl ribonucleotide
  modified_base 107..109: mod_base = OTHER; note = Phosphorothioate linkage
aactttctcttctgcaggtcaagttgagaatcgaaagattcttaataaggcatccttccgatgctgacttctcaccgtccgttttccaataggagcgggcggtatgtttt

SEQ ID NO: 231 - RNA, 110 nt, synthetic construct
  source 1..110: mol_type = other RNA
  misc_feature 1..110: note = Category: MG3-6/3-4 sgRNA targeting TRBC1
  misc_feature 1..110: note = Description: MG3-6/3-4 TRBC1 E3
  modified_base 1..3: mod_base = OTHER; note = 2'O-Methyl ribonucleotide
  modified_base 1..3: mod_base = OTHER; note = Phosphorothioate linkage
  modified_base 108..110: mod_base = OTHER; note = 2'O-Methyl ribonucleotide
  modified_base 107..109: mod_base = OTHER; note = Phosphorothioate linkage
actccacttccagggctgccttgttgagaatcgaaagattcttaataaggcatccttccgatgctgacttctcaccgtccgttttccaataggagcgggcggtatgtttt

SEQ ID NO: 232 - RNA, 110 nt, synthetic construct
  source 1..110: mol_type = other RNA
  misc_feature 1..110: note = Category: MG3-6/3-4 sgRNA targeting TRBC1
  misc_feature 1..110: note = Description: MG3-6/3-4 TRBC1 F3
  modified_base 1..3: mod_base = OTHER; note = 2'O-Methyl ribonucleotide
  modified_base 1..3: mod_base = OTHER; note = Phosphorothioate linkage
  modified_base 108..110: mod_base = OTHER; note = 2'O-Methyl ribonucleotide
  modified_base 107..109: mod_base = OTHER; note = Phosphorothioate linkage
ctccacttccagggctgccttcgttgagaatcgaaagattcttaataaggcatccttccgatgctgacttctcaccgtccgttttccaataggagcgggcggtatgtttt

SEQ ID NO: 233 - RNA, 110 nt, synthetic construct
  source 1..110: mol_type = other RNA
  misc_feature 1..110: note = Category: MG3-6/3-4 sgRNA targeting TRBC1
  misc_feature 1..110: note = Description: MG3-6/3-4 TRBC1 G3
  modified_base 1..3: mod_base = OTHER; note = 2'O-Methyl ribonucleotide
  modified_base 1..3: mod_base = OTHER; note = Phosphorothioate linkage
  modified_base 108..110: mod_base = OTHER; note = 2'O-Methyl ribonucleotide
  modified_base 107..109: mod_base = OTHER; note = Phosphorothioate linkage
tcctttctcttgacctgcagaagttgagaatcgaaagattcttaataaggcatccttccgatgctgacttctcaccgtccgttttccaataggagcgggcggtatgtttt

SEQ ID NO: 234 - RNA, 110 nt, synthetic construct
  source 1..110: mol_type = other RNA
  misc_feature 1..110: note = Category: MG3-6/3-4 sgRNA targeting TRBC1
  misc_feature 1..110: note = Description: MG3-6/3-4 TRBC1 H3
  modified_base 1..3: mod_base = OTHER; note = 2'O-Methyl ribonucleotide
  modified_base 1..3: mod_base = OTHER; note = Phosphorothioate linkage
  modified_base 108..110: mod_base = OTHER; note = 2'O-Methyl ribonucleotide
  modified_base 107..109: mod_base = OTHER; note = Phosphorothioate linkage
agccaggagttgtgaggattgagttgagaatcgaaagattcttaataaggcatccttccgatgctgacttctcaccgtccgttttccaataggagcgggcggtatgtttt

SEQ ID NO: 235 - RNA, 110 nt, synthetic construct
  source 1..110: mol_type = other RNA
  misc_feature 1..110: note = Category: MG3-6/3-4 sgRNA targeting TRBC1
  misc_feature 1..110: note = Description: MG3-6/3-4 TRBC1 A4
  modified_base 1..3: mod_base = OTHER; note = 2'O-Methyl ribonucleotide
  modified_base 1..3: mod_base = OTHER; note = Phosphorothioate linkage
  modified_base 108..110: mod_base = OTHER; note = 2'O-Methyl ribonucleotide
  modified_base 107..109: mod_base = OTHER; note = Phosphorothioate linkage
agtagtagggcccattgaccacgttgagaatcgaaagattcttaataaggcatccttccgatgctgacttctcaccgtccgttttccaataggagcgggcggtatgtttt

SEQ ID NO: 236 - RNA, 110 nt, synthetic construct
  source 1..110: mol_type = other RNA
  misc_feature 1..110: note = Category: MG3-6/3-4 sgRNA targeting TRBC1
  misc_feature 1..110: note = Description: MG3-6/3-4 TRBC1 B4
  modified_base 1..3: mod_base = OTHER; note = 2'O-Methyl ribonucleotide
  modified_base 1..3: mod_base = OTHER; note = Phosphorothioate linkage
  modified_base 108..110: mod_base = OTHER; note = 2'O-Methyl ribonucleotide
  modified_base 107..109: mod_base = OTHER; note = Phosphorothioate linkage
tgcaagttatcttctgaggcacgttgagaatcgaaagattcttaataaggcatccttccgatgctgacttctcaccgtccgttttccaataggagcgggcggtatgtttt

SEQ ID NO: 237 - RNA, 110 nt, synthetic construct
  source 1..110: mol_type = other RNA
  misc_feature 1..110: note = Category: MG3-6/3-4 sgRNA targeting TRBC1
  misc_feature 1..110: note = Description: MG3-6/3-4 TRBC1 C4
  modified_base 1..3: mod_base = OTHER; note = 2'O-Methyl ribonucleotide
  modified_base 1..3: mod_base = OTHER; note = Phosphorothioate linkage
  modified_base 108..110: mod_base = OTHER; note = 2'O-Methyl ribonucleotide
  modified_base 107..109: mod_base = OTHER; note = Phosphorothioate linkage
agttatcttctgaggcacctgagttgagaatcgaaagattcttaataaggcatccttccgatgctgacttctcaccgtccgttttccaataggagcgggcggtatgtttt

SEQ ID NO: 238 - RNA, 110 nt, synthetic construct
  source 1..110: mol_type = other RNA
  misc_feature 1..110: note = Category: MG3-6/3-4 sgRNA targeting TRBC1
  misc_feature 1..110: note = Description: MG3-6/3-4 TRBC1 D4
  modified_base 1..3: mod_base = OTHER; note = 2'O-Methyl ribonucleotide
  modified_base 1..3: mod_base = OTHER; note = Phosphorothioate linkage
  modified_base 108..110: mod_base = OTHER; note = 2'O-Methyl ribonucleotide
  modified_base 107..109: mod_base = OTHER; note = Phosphorothioate linkage
gttatcttctgaggcacctgaagttgagaatcgaaagattcttaataaggcatccttccgatgctgacttctcaccgtccgttttccaataggagcgggcggtatgtttt

SEQ ID NO: 239 - RNA, 110 nt, synthetic construct
  source 1..110: mol_type = other RNA
  misc_feature 1..110: note = Category: MG3-6/3-4 sgRNA targeting TRBC1
  misc_feature 1..110: note = Description: MG3-6/3-4 TRBC1 E4
  modified_base 1..3: mod_base = OTHER; note = 2'O-Methyl ribonucleotide
  modified_base 1..3: mod_base = OTHER; note = Phosphorothioate linkage
  modified_base 108..110: mod_base = OTHER; note = 2'O-Methyl ribonucleotide
  modified_base 107..109: mod_base = OTHER; note = Phosphorothioate linkage
tcaagaaccatgagagagggaggttgagaatcgaaagattcttaataaggcatccttccgatgctgacttctcaccgtccgttttccaataggagcgggcggtatgtttt

SEQ ID NO: 240 - RNA, 110 nt, synthetic construct
  source 1..110: mol_type = other RNA
  misc_feature 1..110: note = Category: MG3-6/3-4 sgRNA targeting TRBC1
  misc_feature 1..110: note = Description: MG3-6/3-4 TRBC1 F4
  modified_base 1..3: mod_base = OTHER; note = 2'O-Methyl ribonucleotide
  modified_base 1..3: mod_base = OTHER; note = Phosphorothioate linkage
  modified_base 108..110: mod_base = OTHER; note = 2'O-Methyl ribonucleotide
  modified_base 107..109: mod_base = OTHER; note = Phosphorothioate linkage
caagaaccatgagagagggagagttgagaatcgaaagattcttaataaggcatccttccgatgctgacttctcaccgtccgttttccaataggagcgggcggtatgtttt

SEQ ID NO: 241 - RNA, 110 nt, synthetic construct
  source 1..110: mol_type = other RNA
  misc_feature 1..110: note = Category: MG3-6/3-4 sgRNA targeting TRBC1
  misc_feature 1..110: note = Description: MG3-6/3-4 TRBC1 G4
  modified_base 1..3: mod_base = OTHER; note = 2'O-Methyl ribonucleotide
  modified_base 1..3: mod_base = OTHER; note = Phosphorothioate linkage
  modified_base 108..110: mod_base = OTHER; note = 2'O-Methyl ribonucleotide
  modified_base 107..109: mod_base = OTHER; note = Phosphorothioate linkage
ttacccgaggtaaagccacagtgttgagaatcgaaagattcttaataaggcatccttccgatgctgacttctcaccgtccgttttccaataggagcgggcggtatgtttt

SEQ ID NO: 242 - RNA, 110 nt, synthetic construct
  source 1..110: mol_type = other RNA
  misc_feature 1..110: note = Category: MG3-6/3-4 sgRNA targeting TRBC1
  misc_feature 1..110: note = Description: MG3-6/3-4 TRBC1 H4
  modified_base 1..3: mod_base = OTHER; note = 2'O-Methyl ribonucleotide
  modified_base 1..3: mod_base = OTHER; note = Phosphorothioate linkage
  modified_base 108..110: mod_base = OTHER; note = 2'O-Methyl ribonucleotide
  modified_base 107..109: mod_base = OTHER; note = Phosphorothioate linkage
ccgaggtaaagccacagtctgagttgagaatcgaaagattcttaataaggcatccttccgatgctgacttctcaccgtccgttttccaataggagcgggcggtatgtttt

SEQ ID NO: 243 - RNA, 110 nt, synthetic construct
  source 1..110: mol_type = other RNA
  misc_feature 1..110: note = Category: MG3-6/3-4 sgRNA targeting TRBC1
  misc_feature 1..110: note = Description: MG3-6/3-4 TRBC1 A5
  modified_base 1..3: mod_base = OTHER; note = 2'O-Methyl ribonucleotide
  modified_base 1..3: mod_base = OTHER; note = Phosphorothioate linkage
  modified_base 108..110: mod_base = OTHER; note = 2'O-Methyl ribonucleotide
  modified_base 107..109: mod_base = OTHER; note = Phosphorothioate linkage
cagtctgaaagaaagcagggaggttgagaatcgaaagattcttaataaggcatccttccgatgctgacttctcaccgtccgttttccaataggagcgggcggtatgtttt

SEQ ID NO: 244 - RNA, 110 nt, synthetic construct
  source 1..110: mol_type = other RNA
  misc_feature 1..110: note = Category: MG3-6/3-4 sgRNA targeting TRBC1
  misc_feature 1..110: note = Description: MG3-6/3-4 TRBC1 B5
  modified_base 1..3: mod_base = OTHER; note = 2'O-Methyl ribonucleotide
  modified_base 1..3: mod_base = OTHER; note = Phosphorothioate linkage
  modified_base 108..110: mod_base = OTHER; note = 2'O-Methyl ribonucleotide
  modified_base 107..109: mod_base = OTHER; note = Phosphorothioate linkage
agtctgaaagaaagcagggagagttgagaatcgaaagattcttaataaggcatccttccgatgctgacttctcaccgtccgttttccaataggagcgggcggtatgtttt

SEQ ID NO: 245 - RNA, 110 nt, synthetic construct
  source 1..110: mol_type = other RNA
  misc_feature 1..110: note = Category: MG3-6/3-4 sgRNA targeting TRBC1
  misc_feature 1..110: note = Description: MG3-6/3-4 TRBC1 C5
  modified_base 1..3: mod_base = OTHER; note = 2'O-Methyl ribonucleotide
  modified_base 1..3: mod_base = OTHER; note = Phosphorothioate linkage
  modified_base 108..110: mod_base = OTHER; note = 2'O-Methyl ribonucleotide
  modified_base 107..109: mod_base = OTHER; note = Phosphorothioate linkage
gtctgaaagaaagcagggagaggttgagaatcgaaagattcttaataaggcatccttccgatgctgacttctcaccgtccgttttccaataggagcgggcggtatgtttt

SEQ ID NO: 246 - RNA, 110 nt, synthetic construct
  source 1..110: mol_type = other RNA
  misc_feature 1..110: note = Category: MG3-6/3-4 sgRNA targeting TRBC1
  misc_feature 1..110: note = Description: MG3-6/3-4 TRBC1 D5
  modified_base 1..3: mod_base = OTHER; note = 2'O-Methyl ribonucleotide
  modified_base 1..3: mod_base = OTHER; note = Phosphorothioate linkage
  modified_base 108..110: mod_base = OTHER; note = 2'O-Methyl ribonucleotide
  modified_base 107..109: mod_base = OTHER; note = Phosphorothioate linkage
gaaagaaagcagggagaggaaagttgagaatcgaaagattcttaataaggcatccttccgatgctgacttctcaccgtccgttttccaataggagcgggcggtatgtttt

SEQ ID NO: 247 - RNA, 110 nt, synthetic construct
  source 1..110: mol_type = other RNA
  misc_feature 1..110: note = Category: MG3-6/3-4 sgRNA targeting TRBC1
  misc_feature 1..110: note = Description: MG3-6/3-4 TRBC1 E5
  modified_base 1..3: mod_base = OTHER; note = 2'O-Methyl ribonucleotide
  modified_base 1..3: mod_base = OTHER; note = Phosphorothioate linkage
  modified_base 108..110: mod_base = OTHER; note = 2'O-Methyl ribonucleotide
  modified_base 107..109: mod_base = OTHER; note = Phosphorothioate linkage
gagaccttattttcataggcaagttgagaatcgaaagattcttaataaggcatccttccgatgctgacttctcaccgtccgttttccaataggagcgggcggtatgtttt

SEQ ID NO: 248 - RNA, 110 nt, synthetic construct
  source 1..110: mol_type = other RNA
  misc_feature 1..110: note = Category: MG3-6/3-4 sgRNA targeting TRBC1
  misc_feature 1..110: note = Description: MG3-6/3-4 TRBC1 F5
  modified_base 1..3: mod_base = OTHER; note = 2'O-Methyl ribonucleotide
  modified_base 1..3: mod_base = OTHER; note = Phosphorothioate linkage
  modified_base 108..110: mod_base = OTHER; note = 2'O-Methyl ribonucleotide
  modified_base 107..109: mod_base = OTHER; note = Phosphorothioate linkage
gatgagagttacacaggccacagttgagaatcgaaagattcttaataaggcatccttccgatgctgacttctcaccgtccgttttccaataggagcgggcggtatgtttt

SEQ ID NO: 249 - RNA, 110 nt, synthetic construct
  source 1..110: mol_type = other RNA
  misc_feature 1..110: note = Category: MG3-6/3-4 sgRNA targeting TRBC1
  misc_feature 1..110: note = Description: MG3-6/3-4 TRBC1 G5
  modified_base 1..3: mod_base = OTHER; note = 2'O-Methyl ribonucleotide
  modified_base 1..3: mod_base = OTHER; note = Phosphorothioate linkage
  modified_base 108..110: mod_base = OTHER; note = 2'O-Methyl ribonucleotide
  modified_base 107..109: mod_base = OTHER; note = Phosphorothioate linkage
agctgcttggctctgttgggctgttgagaatcgaaagattcttaataaggcatccttccgatgctgacttctcaccgtccgttttccaataggagcgggcggtatgtttt

SEQ ID NO: 250 - RNA, 110 nt, synthetic construct
  source 1..110: mol_type = other RNA
  misc_feature 1..110: note = Category: MG3-6/3-4 sgRNA targeting TRBC1
  misc_feature 1..110: note = Description: MG3-6/3-4 TRBC1 H5
  modified_base 1..3: mod_base = OTHER; note = 2'O-Methyl ribonucleotide
  modified_base 1..3: mod_base = OTHER; note = Phosphorothioate linkage
  modified_base 108..110: mod_base = OTHER; note = 2'O-Methyl ribonucleotide
  modified_base 107..109: mod_base = OTHER; note = Phosphorothioate linkage
tgttgggctgagaatctgggaggttgagaatcgaaagattcttaataaggcatccttccgatgctgacttctcaccgtccgttttccaataggagcgggcggtatgtttt

SEQ ID NO: 251 - RNA, 110 nt, synthetic construct
  source 1..110: mol_type = other RNA
  misc_feature 1..110: note = Category: MG3-6/3-4 sgRNA targeting TRBC1
  misc_feature 1..110: note = Description: MG3-6/3-4 TRBC1 A6
  modified_base 1..3: mod_base = OTHER; note = 2'O-Methyl ribonucleotide
  modified_base 1..3: mod_base = OTHER; note = Phosphorothioate linkage
  modified_base 108..110: mod_base = OTHER; note = 2'O-Methyl ribonucleotide
  modified_base 107..109: mod_base = OTHER; note = Phosphorothioate linkage
ggaacaccttgttcaggtcctcgttgagaatcgaaagattcttaataaggcatccttccgatgctgacttctcaccgtccgttttccaataggagcgggcggtatgtttt

SEQ ID NO: 252 - DNA, 22 bp, Homo sapiens
  source 1..22: mol_type = genomic DNA
  misc_feature 1..22: note = Category: DNA sequence of TRBC1 target site
  misc_feature 1..22: note = Description: MG3-6/3-4 TRBC1 A1
cagaagcagagatctcccacac

SEQ ID NO: 253 - DNA, 22 bp, Homo sapiens
  source 1..22: mol_type = genomic DNA
  misc_feature 1..22: note = Category: DNA sequence of TRBC1 target site
  misc_feature 1..22: note = Description: MG3-6/3-4 TRBC1 B1
ccacgtggagctgagctggtgg

SEQ ID NO: 254 - DNA, 22 bp, Homo sapiens
  source 1..22: mol_type = genomic DNA
  misc_feature 1..22: note = Category: DNA sequence of TRBC1 target site
  misc_feature 1..22: note = Description: MG3-6/3-4 TRBC1 C1
agtccagttctacgggctctcg

SEQ ID NO: 255 - DNA, 22 bp, Homo sapiens
  source 1..22: mol_type = genomic DNA
  misc_feature 1..22: note = Category: DNA sequence of TRBC1 target site
  misc_feature 1..22: note = Description: MG3-6/3-4 TRBC1 D1
gattaggtgagaccagctacca

SEQ ID NO: 256 - DNA, 22 bp, Homo sapiens
  source 1..22: mol_type = genomic DNA
  misc_feature 1..22: note = Category: DNA sequence of TRBC1 target site
  misc_feature 1..22: note = Description: MG3-6/3-4 TRBC1 E1
attaggtgagaccagctaccag

SEQ ID NO: 257 - DNA, 22 bp, Homo sapiens
  source 1..22: mol_type = genomic DNA
  misc_feature 1..22: note = Category: DNA sequence of TRBC1 target site
  misc_feature 1..22: note = Description: MG3-6/3-4 TRBC1 F1
ttaggtgagaccagctaccagg

SEQ ID NO: 258 - DNA, 22 bp, Homo sapiens
  source 1..22: mol_type = genomic DNA
  misc_feature 1..22: note = Category: DNA sequence of TRBC1 target site
  misc_feature 1..22: note = Description: MG3-6/3-4 TRBC1 G1
tgagaccagctaccagggaaaa

SEQ ID NO: 259 - DNA, 22 bp, Homo sapiens
  source 1..22: mol_type = genomic DNA
  misc_feature 1..22: note = Category: DNA sequence of TRBC1 target site
  misc_feature 1..22: note = Description: MG3-6/3-4 TRBC1 H1
caggtagcagacaagactagat

SEQ ID NO: 260 - DNA, 22 bp, Homo sapiens
  source 1..22: mol_type = genomic DNA
  misc_feature 1..22: note = Category: DNA sequence of TRBC1 target site
  misc_feature 1..22: note = Description: MG3-6/3-4 TRBC1 A2
aggtagcagacaagactagatc

SEQ ID NO: 261 - DNA, 22 bp, Homo sapiens
  source 1..22: mol_type = genomic DNA
  misc_feature 1..22: note = Category: DNA sequence of TRBC1 target site
  misc_feature 1..22: note = Description: MG3-6/3-4 TRBC1 B2
agcagacaagactagatccaaa

SEQ ID NO: 262 - DNA, 22 bp, Homo sapiens
  source 1..22: mol_type = genomic DNA
  misc_feature 1..22: note = Category: DNA sequence of TRBC1 target site
  misc_feature 1..22: note = Description: MG3-6/3-4 TRBC1 C2
ggaaccagcgcacaccatgaag

SEQ ID NO: 263 - DNA, 22 bp, Homo sapiens
  source 1..22: mol_type = genomic DNA
  misc_feature 1..22: note = Category: DNA sequence of TRBC1 target site
  misc_feature 1..22: note = Description: MG3-6/3-4 TRBC1 D2
gtggctgacatctgcatggcag

SEQ ID NO: 264 - DNA, 22 bp, Homo sapiens
  source 1..22: mol_type = genomic DNA
  misc_feature 1..22: note = Category: DNA sequence of TRBC1 target site
  misc_feature 1..22: note = Description: MG3-6/3-4 TRBC1 E2
ggcctgggagtctgtgccaact

SEQ ID NO: 265 - DNA, 22 bp, Homo sapiens
  source 1..22: mol_type = genomic DNA
  misc_feature 1..22: note = Category: DNA sequence of TRBC1 target site
  misc_feature 1..22: note = Description: MG3-6/3-4 TRBC1 F2
ctgactttacttttaattgcct

SEQ ID NO: 266 - DNA, 22 bp, Homo sapiens
  source 1..22: mol_type = genomic DNA
  misc_feature 1..22: note = Category: DNA sequence of TRBC1 target site
  misc_feature 1..22: note = Description: MG3-6/3-4 TRBC1 G2
tgactttacttttaattgccta

SEQ ID NO: 267 - DNA, 22 bp, Homo sapiens
  source 1..22: mol_type = genomic DNA
  misc_feature 1..22: note = Category: DNA sequence of TRBC1 target site
  misc_feature 1..22: note = Description: MG3-6/3-4 TRBC1 H2
gactttacttttaattgcctat

SEQ ID NO: 268 - DNA, 22 bp, Homo sapiens
  source 1..22: mol_type = genomic DNA
  misc_feature 1..22: note = Category: DNA sequence of TRBC1 target site
  misc_feature 1..22: note = Description: MG3-6/3-4 TRBC1 A3
gggaaggagaagctggagtcac

SEQ ID NO: 269 - DNA, 22 bp, Homo sapiens
  source 1..22: mol_type = genomic DNA
  misc_feature 1..22: note = Category: DNA sequence of TRBC1 target site
  misc_feature 1..22: note = Description: MG3-6/3-4 TRBC1 B3
ggaaggagaagctggagtcacc

SEQ ID NO: 270 - DNA, 22 bp, Homo sapiens
  source 1..22: mol_type = genomic DNA
  misc_feature 1..22: note = Category: DNA sequence of TRBC1 target site
  misc_feature 1..22: note = Description: MG3-6/3-4 TRBC1 C3
aactcctggctcttaataaccc

SEQ ID NO: 271 - DNA, 22 bp, Homo sapiens
  source 1..22: mol_type = genomic DNA
  misc_feature 1..22: note = Category: DNA sequence of TRBC1 target site
  misc_feature 1..22: note = Description: MG3-6/3-4 TRBC1 D3
aactttctcttctgcaggtcaa

SEQ ID NO: 272 - DNA, 22 bp, Homo sapiens
  source 1..22: mol_type = genomic DNA
  misc_feature 1..22: note = Category: DNA sequence of TRBC1 target site
  misc_feature 1..22: note = Description: MG3-6/3-4 TRBC1 E3
actccacttccagggctgcctt

SEQ ID NO: 273 - DNA, 22 bp, Homo sapiens
  source 1..22: mol_type = genomic DNA
  misc_feature 1..22: note = Category: DNA sequence of TRBC1 target site
  misc_feature 1..22: note = Description: MG3-6/3-4 TRBC1 F3
ctccacttccagggctgccttc

SEQ ID NO: 274 - DNA, 22 bp, Homo sapiens
  source 1..22: mol_type = genomic DNA
  misc_feature 1..22: note = Category: DNA sequence of TRBC1 target site
  misc_feature 1..22: note = Description: MG3-6/3-4 TRBC1 G3
tcctttctcttgacctgcagaa

SEQ ID NO: 275 - DNA, 22 bp, Homo sapiens
  source 1..22: mol_type = genomic DNA
  misc_feature 1..22: note = Category: DNA sequence of TRBC1 target site
  misc_feature 1..22: note = Description: MG3-6/3-4 TRBC1 H3
agccaggagttgtgaggattga

SEQ ID NO: 276 - DNA, 22 bp, Homo sapiens
  source 1..22: mol_type = genomic DNA
  misc_feature 1..22: note = Category: DNA sequence of TRBC1 target site
  misc_feature 1..22: note = Description: MG3-6/3-4 TRBC1 A4
agtagtagggcccattgaccac

SEQ ID NO: 277 - DNA, 22 bp, Homo sapiens
  source 1..22: mol_type = genomic DNA
  misc_feature 1..22: note = Category: DNA sequence of TRBC1 target site
  misc_feature 1..22: note = Description: MG3-6/3-4 TRBC1 B4
tgcaagttatcttctgaggcac

SEQ ID NO: 278 - DNA, 22 bp, Homo sapiens
  source 1..22: mol_type = genomic DNA
  misc_feature 1..22: note = Category: DNA sequence of TRBC1 target site
  misc_feature 1..22: note = Description: MG3-6/3-4 TRBC1 C4
agttatcttctgaggcacctga

SEQ ID NO: 279 - DNA, 22 bp, Homo sapiens
  source 1..22: mol_type = genomic DNA
  misc_feature 1..22: note = Category: DNA sequence of TRBC1 target site
  misc_feature 1..22: note = Description: MG3-6/3-4 TRBC1 D4
gttatcttctgaggcacctgaa

SEQ ID NO: 280 - DNA, 22 bp, Homo sapiens
  source 1..22: mol_type = genomic DNA
  misc_feature 1..22: note = Category: DNA sequence of TRBC1 target site
  misc_feature 1..22: note = Description: MG3-6/3-4 TRBC1 E4
tcaagaaccatgagagagggag

SEQ ID NO: 281 - DNA, 22 bp, Homo sapiens
  source 1..22: mol_type = genomic DNA
  misc_feature 1..22: note = Category: DNA sequence of TRBC1 target site
  misc_feature 1..22: note = Description: MG3-6/3-4 TRBC1 F4
caagaaccatgagagagggaga

SEQ ID NO: 282 - DNA, 22 bp, Homo sapiens
  source 1..22: mol_type = genomic DNA
  misc_feature 1..22: note = Category: DNA sequence of TRBC1 target site
  misc_feature 1..22: note = Description: MG3-6/3-4 TRBC1 G4
ttacccgaggtaaagccacagt

SEQ ID NO: 283 - DNA, 22 bp, Homo sapiens
  source 1..22: mol_type = genomic DNA
  misc_feature 1..22: note = Category: DNA sequence of TRBC1 target site
  misc_feature 1..22: note = Description: MG3-6/3-4 TRBC1 H4
ccgaggtaaagccacagtctga

SEQ ID NO: 284 - DNA, 22 bp, Homo sapiens
  source 1..22: mol_type = genomic DNA
  misc_feature 1..22: note = Category: DNA sequence of TRBC1 target site
  misc_feature 1..22: note = Description: MG3-6/3-4 TRBC1 A5
cagtctgaaagaaagcagggag

SEQ ID NO: 285 - DNA, 22 bp, Homo sapiens
  source 1..22: mol_type = genomic DNA
  misc_feature 1..22: note = Category: DNA sequence of TRBC1 target site
  misc_feature 1..22: note = Description: MG3-6/3-4 TRBC1 B5
agtctgaaagaaagcagggaga

SEQ ID NO: 286 - DNA, 22 bp, Homo sapiens
  source 1..22: mol_type = genomic DNA
  misc_feature 1..22: note = Category: DNA sequence of TRBC1 target site
  misc_feature 1..22: note = Description: MG3-6/3-4 TRBC1 C5
gtctgaaagaaagcagggagag

SEQ ID NO: 287 - DNA, 22 bp, Homo sapiens
  source 1..22: mol_type = genomic DNA
  misc_feature 1..22: note = Category: DNA sequence of TRBC1 target site
  misc_feature 1..22: note = Description: MG3-6/3-4 TRBC1 D5
gaaagaaagcagggagaggaaa

SEQ ID NO: 288 - DNA, 22 bp, Homo sapiens
  source 1..22: mol_type = genomic DNA
  misc_feature 1..22: note = Category: DNA sequence of TRBC1 target site
  misc_feature 1..22: note = Description: MG3-6/3-4 TRBC1 E5
gagaccttattttcataggcaa

SEQ ID NO: 289 - DNA, 22 bp, Homo sapiens
  source 1..22: mol_type = genomic DNA
  misc_feature 1..22: note = Category: DNA sequence of TRBC1 target site
  misc_feature 1..22: note = Description: MG3-6/3-4 TRBC1 F5
gatgagagttacacaggccaca

SEQ ID NO: 290 - DNA, 22 bp, Homo sapiens
  source 1..22: mol_type = genomic DNA
  misc_feature 1..22: note = Category: DNA sequence of TRBC1 target site
  misc_feature 1..22: note = Description: MG3-6/3-4 TRBC1 G5
agctgcttggctctgttgggct

SEQ ID NO: 291 - DNA, 22 bp, Homo sapiens
  source 1..22: mol_type = genomic DNA
  misc_feature 1..22: note = Category: DNA sequence of TRBC1 target site
  misc_feature 1..22: note = Description: MG3-6/3-4 TRBC1 H5
tgttgggctgagaatctgggag

SEQ ID NO: 292 - DNA, 22 bp, Homo sapiens
  source 1..22: mol_type = genomic DNA
  misc_feature 1..22: note = Category: DNA sequence of TRBC1 target site
  misc_feature 1..22: note = Description: MG3-6/3-4 TRBC1 A6
ggaacaccttgttcaggtcctc

SEQ ID NO: 293 - RNA, 110 nt, synthetic construct
  source 1..110: mol_type = other RNA
  misc_feature 1..110: note = Category: MG3-6/3-4 sgRNA targeting TRBC2
  misc_feature 1..110: note = Description: MG3-6/3-4 TRBC2 A1
  modified_base 1..3: mod_base = OTHER; note = 2'O-Methyl ribonucleotide
  modified_base 1..3: mod_base = OTHER; note = Phosphorothioate linkage
  modified_base 108..110: mod_base = OTHER; note = 2'O-Methyl ribonucleotide
  modified_base 107..109: mod_base = OTHER; note = Phosphorothioate linkage
acctcttccctttccagaggacgttgagaatcgaaagattcttaataaggcatccttccgatgctgacttctcaccgtccgttttccaataggagcgggcggtatgtttt

SEQ ID NO: 294 - RNA, 110 nt, synthetic construct
  source 1..110: mol_type = other RNA
  misc_feature 1..110: note = Category: MG3-6/3-4 sgRNA targeting TRBC2
  misc_feature 1..110: note = Description: MG3-6/3-4 TRBC2 B1
  modified_base 1..3: mod_base = OTHER; note = 2'O-Methyl ribonucleotide
  modified_base 1..3: mod_base = OTHER; note = Phosphorothioate linkage
  modified_base 108..110: mod_base = OTHER; note = 2'O-Methyl ribonucleotide
  modified_base 107..109: mod_base = OTHER; note = Phosphorothioate linkage
cctcttccctttccagaggaccgttgagaatcgaaagattcttaataaggcatccttccgatgctgacttctcaccgtccgttttccaataggagcgggcggtatgtttt

SEQ ID NO: 295 - RNA, 110 nt, synthetic construct
  source 1..110: mol_type = other RNA
  misc_feature 1..110: note = Category: MG3-6/3-4 sgRNA targeting TRBC2
  misc_feature 1..110: note = Description: MG3-6/3-4 TRBC2 C1
  modified_base 1..3: mod_base = OTHER; note = 2'O-Methyl ribonucleotide
  modified_base 1..3: mod_base = OTHER; note = Phosphorothioate linkage
  modified_base 108..110: mod_base = OTHER; note = 2'O-Methyl ribonucleotide
  modified_base 107..109: mod_base = OTHER; note = Phosphorothioate linkage
ctcttccctttccagaggacctgttgagaatcgaaagattcttaataaggcatccttccgatgctgacttctcaccgtccgttttccaataggagcgggcggtatgtttt

SEQ ID NO: 296 - RNA, 110 nt, synthetic construct; identical to SEQ ID NO: 211
  source 1..110: mol_type = other RNA
  misc_feature 1..110: note = Category: MG3-6/3-4 sgRNA targeting TRBC2
  misc_feature 1..110: note = Description: MG3-6/3-4 TRBC2 D1
  modified_base 1..3: mod_base = OTHER; note = 2'O-Methyl ribonucleotide
  modified_base 1..3: mod_base = OTHER; note = Phosphorothioate linkage
  modified_base 108..110: mod_base = OTHER; note = 2'O-Methyl ribonucleotide
  modified_base 107..109: mod_base = OTHER; note = Phosphorothioate linkage

SEQ ID NO: 297 - RNA, 110 nt, synthetic construct; identical to SEQ ID NO: 212
  source 1..110: mol_type = other RNA
  misc_feature 1..110: note = Category: MG3-6/3-4 sgRNA targeting TRBC2
  misc_feature 1..110: note = Description: MG3-6/3-4 TRBC2 E1
  modified_base 1..3: mod_base = OTHER; note = 2'O-Methyl ribonucleotide
  modified_base 1..3: mod_base = OTHER; note = Phosphorothioate linkage
  modified_base 108..110: mod_base = OTHER; note = 2'O-Methyl ribonucleotide
  modified_base 107..109: mod_base = OTHER; note = Phosphorothioate linkage

SEQ ID NO: 298 - RNA, 110 nt, synthetic construct; identical to SEQ ID NO: 213
  source 1..110: mol_type = other RNA
  misc_feature 1..110: note = Category: MG3-6/3-4 sgRNA targeting TRBC2
  misc_feature 1..110: note = Description: MG3-6/3-4 TRBC2 F1
  modified_base 1..3: mod_base = OTHER; note = 2'O-Methyl ribonucleotide
  modified_base 1..3: mod_base = OTHER; note = Phosphorothioate linkage
  modified_base 108..110: mod_base = OTHER; note = 2'O-Methyl ribonucleotide
  modified_base 107..109: mod_base = OTHER; note = Phosphorothioate linkage

SEQ ID NO: 299 - RNA, 110 nt, synthetic construct; identical to SEQ ID NO: 214
  source 1..110: mol_type = other RNA
  misc_feature 1..110: note = Category: MG3-6/3-4 sgRNA targeting TRBC2
  misc_feature 1..110: note = Description: MG3-6/3-4 TRBC2 G1
  modified_base 1..3: mod_base = OTHER; note = 2'O-Methyl ribonucleotide
  modified_base 1..3: mod_base = OTHER; note = Phosphorothioate linkage
  modified_base 108..110: mod_base = OTHER; note = 2'O-Methyl ribonucleotide
  modified_base 107..109: mod_base = OTHER; note = Phosphorothioate linkage

SEQ ID NO: 300 - RNA, 110 nt, synthetic construct; identical to SEQ ID NO: 215
  source 1..110: mol_type = other RNA
  misc_feature 1..110: note = Category: MG3-6/3-4 sgRNA targeting TRBC2
  misc_feature 1..110: note = Description: MG3-6/3-4 TRBC2 H1
  modified_base 1..3: mod_base = OTHER; note = 2'O-Methyl ribonucleotide
  modified_base 1..3: mod_base = OTHER; note = Phosphorothioate linkage
  modified_base 108..110: mod_base = OTHER; note = 2'O-Methyl ribonucleotide
  modified_base 107..109: mod_base = OTHER; note = Phosphorothioate linkage

SEQ ID NO: 301 - RNA, 110 nt, synthetic construct; identical to SEQ ID NO: 216
  source 1..110: mol_type = other RNA
  misc_feature 1..110: note = Category: MG3-6/3-4 sgRNA targeting TRBC2
  misc_feature 1..110: note = Description: MG3-6/3-4 TRBC2 A2
  modified_base 1..3: mod_base = OTHER; note = 2'O-Methyl ribonucleotide
  modified_base 1..3: mod_base = OTHER; note = Phosphorothioate linkage
  modified_base 108..110: mod_base = OTHER; note = 2'O-Methyl ribonucleotide
  modified_base 107..109: mod_base = OTHER; note = Phosphorothioate linkage

SEQ ID NO: 302 - RNA, 110 nt, synthetic construct; identical to SEQ ID NO: 217
  source 1..110: mol_type = other RNA
  misc_feature 1..110: note = Category: MG3-6/3-4 sgRNA targeting TRBC2
  misc_feature 1..110: note = Description: MG3-6/3-4 TRBC2 B2
  modified_base 1..3: mod_base = OTHER; note = 2'O-Methyl ribonucleotide
  modified_base 1..3: mod_base = OTHER; note = Phosphorothioate linkage
  modified_base 108..110: mod_base = OTHER; note = 2'O-Methyl ribonucleotide
  modified_base 107..109: mod_base = OTHER; note = Phosphorothioate linkage

SEQ ID NO: 303 - RNA, 110 nt, synthetic construct
  source 1..110: mol_type = other RNA
  misc_feature 1..110: note = Category: MG3-6/3-4 sgRNA targeting TRBC2
  misc_feature 1..110: note = Description: MG3-6/3-4 TRBC2 C2
  modified_base 1..3: mod_base = OTHER; note = 2'O-Methyl ribonucleotide
  modified_base 1..3: mod_base = OTHER; note = Phosphorothioate linkage
  modified_base 108..110: mod_base = OTHER; note = 2'O-Methyl ribonucleotide
  modified_base 107..109: mod_base = OTHER; note = Phosphorothioate linkage
tagcggacaagactagatccaggttgagaatcgaaagattcttaataaggcatccttccgatgctgacttctcaccgtccgttttccaataggagcgggcggtatgtttt

SEQ ID NO: 304 - RNA, 110 nt, synthetic construct
  source 1..110: mol_type = other RNA
  misc_feature 1..110: note = Category: MG3-6/3-4 sgRNA targeting TRBC2
  misc_feature 1..110: note = Description: MG3-6/3-4 TRBC2 D2
  modified_base 1..3: mod_base = OTHER; note = 2'O-Methyl ribonucleotide
  modified_base 1..3: mod_base = OTHER; note = Phosphorothioate linkage
  modified_base 108..110: mod_base = OTHER; note = 2'O-Methyl ribonucleotide
  modified_base 107..109: mod_base = OTHER; note = Phosphorothioate linkage
cccccaccaagaagcatagagggttgagaatcgaaagattcttaataaggcatccttccgatgctgacttctcaccgtccgttttccaataggagcgggcggtatgtttt

SEQ ID NO: 305 - RNA, 110 nt, synthetic construct
  source 1..110: mol_type = other RNA
  misc_feature 1..110: note = Category: MG3-6/3-4 sgRNA targeting TRBC2
  misc_feature 1..110: note = Description: MG3-6/3-4 TRBC2 E2
  modified_base 1..3: mod_base = OTHER; note = 2'O-Methyl ribonucleotide
  modified_base 1..3: mod_base = OTHER; note = Phosphorothioate linkage
  modified_base 108..110: mod_base = OTHER; note = 2'O-Methyl ribonucleotide
  modified_base 107..109: mod_base = OTHER; note = Phosphorothioate linkage
tctgctctcgaaccagggcatggttgagaatcgaaagattcttaataaggcatccttccgatgctgacttctcaccgtccgttttccaataggagcgggcggtatgtttt

SEQ ID NO: 306 - RNA, 110 nt, synthetic construct
  source 1..110: mol_type = other RNA
  misc_feature 1..110: note = Category: MG3-6/3-4 sgRNA targeting TRBC2
  misc_feature 1..110: note = Description: MG3-6/3-4 TRBC2 F2
  modified_base 1..3: mod_base = OTHER; note = 2'O-Methyl ribonucleotide
  modified_base 1..3: mod_base = OTHER; note = Phosphorothioate linkage
  modified_base 108..110: mod_base = OTHER; note = 2'O-Methyl ribonucleotide
  modified_base 107..109: mod_base = OTHER; note = Phosphorothioate linkage
ggaacatcacacatgggcataagttgagaatcgaaagattcttaataaggcatccttccgatgctgacttctcaccgtccgttttccaataggagcgggcggtatgtttt

SEQ ID NO: 307 - RNA, 110 nt, synthetic construct
  source 1..110: mol_type = other RNA
  misc_feature 1..110: note = Category: MG3-6/3-4 sgRNA targeting TRBC2
  misc_feature 1..110: note = Description: MG3-6/3-4 TRBC2 G2
  modified_base 1..3: mod_base = OTHER; note = 2'O-Methyl ribonucleotide
  modified_base 1..3: mod_base = OTHER; note = Phosphorothioate linkage
  modified_base 108..110: mod_base = OTHER; note = 2'O-Methyl ribonucleotide
  modified_base 107..109: mod_base = OTHER; note = Phosphorothioate linkage
cctaatatatcctatcacctcagttgagaatcgaaagattcttaataaggcatccttccgatgctgacttctcaccgtccgttttccaataggagcgggcggtatgtttt

SEQ ID NO: 308 - RNA, 110 nt, synthetic construct
  source 1..110: mol_type = other RNA
  misc_feature 1..110: note = Category: MG3-6/3-4 sgRNA targeting TRBC2
  misc_feature 1..110: note = Description: MG3-6/3-4 TRBC2 H2
  modified_base 1..3: mod_base = OTHER; note = 2'O-Methyl ribonucleotide
  modified_base 1..3: mod_base = OTHER; note = Phosphorothioate linkage
  modified_base 108..110: mod_base = OTHER; note = 2'O-Methyl ribonucleotide
  modified_base 107..109: mod_base = OTHER; note = Phosphorothioate linkage
accataatgaagccagactggggttgagaatcgaaagattcttaataaggcatccttccgatgctgacttctcaccgtccgttttccaataggagcgggcggtatgtttt

SEQ ID NO: 309 - RNA, 110 nt, synthetic construct
  source 1..110: mol_type = other RNA
  misc_feature 1..110: note = Category: MG3-6/3-4 sgRNA targeting TRBC2
  misc_feature 1..110: note = Description: MG3-6/3-4 TRBC2 A3
  modified_base 1..3: mod_base = OTHER; note = 2'O-Methyl ribonucleotide
  modified_base 1..3: mod_base = OTHER; note = Phosphorothioate linkage
  modified_base 108..110: mod_base = OTHER; note = 2'O-Methyl ribonucleotide
  modified_base 107..109: mod_base = OTHER; note = Phosphorothioate linkage
ccataatgaagccagactgggggttgagaatcgaaagattcttaataaggcatccttccgatgctgacttctcaccgtccgttttccaataggagcgggcggtatgtttt

SEQ ID NO: 310 - RNA, 110 nt, synthetic construct
  source 1..110: mol_type = other RNA
  misc_feature 1..110: note = Category: MG3-6/3-4 sgRNA targeting TRBC2
  misc_feature 1..110: note = Description: MG3-6/3-4 TRBC2 B3
  modified_base 1..3: mod_base = OTHER; note = 2'O-Methyl ribonucleotide
  modified_base 1..3: mod_base = OTHER; note = Phosphorothioate linkage
  modified_base 108..110: mod_base = OTHER; note = 2'O-Methyl ribonucleotide
  modified_base 107..109: mod_base = OTHER; note = Phosphorothioate linkage
cataatgaagccagactggggagttgagaatcgaaagattcttaataaggcatccttccgatgctgacttctcaccgtccgttttccaataggagcgggcggtatgtttt

SEQ ID NO: 311 - RNA, 110 nt, synthetic construct
  source 1..110: mol_type = other RNA
  misc_feature 1..110: note = Category: MG3-6/3-4 sgRNA targeting TRBC2
  misc_feature 1..110: note = Description: MG3-6/3-4 TRBC2 C3
  modified_base 1..3: mod_base = OTHER; note = 2'O-Methyl ribonucleotide
  modified_base 1..3: mod_base = OTHER; note = Phosphorothioate linkage
  modified_base 108..110: mod_base = OTHER; note = 2'O-Methyl ribonucleotide
  modified_base 107..109: mod_base = OTHER; note = Phosphorothioate linkage
gccagactggggagaaaatgcagttgagaatcgaaagattcttaataaggcatccttccgatgctgacttctcaccgtccgttttccaataggagcgggcggtatgtttt

SEQ ID NO: 312 - RNA, 110 nt, synthetic construct
  source 1..110: mol_type = other RNA
  misc_feature 1..110: note = Category: MG3-6/3-4 sgRNA targeting TRBC2
  misc_feature 1..110: note = Description: MG3-6/3-4 TRBC2 D3
  modified_base 1..3: mod_base = OTHER; note = 2'O-Methyl ribonucleotide
  modified_base 1..3: mod_base = OTHER; note = Phosphorothioate linkage
  modified_base 108..110: mod_base = OTHER; note = 2'O-Methyl ribonucleotide
  modified_base 107..109: mod_base = OTHER; note = Phosphorothioate linkage
ggagaaaatgcagggaatatcagttgagaatcgaaagattcttaataaggcatccttccgatgctgacttctcaccgtccgttttccaataggagcgggcggtatgtttt

SEQ ID NO: 313 - RNA, 110 nt, synthetic construct
  source 1..110: mol_type = other RNA
  misc_feature 1..110: note = Category: MG3-6/3-4 sgRNA targeting TRBC2
  misc_feature 1..110: note = Description: MG3-6/3-4 TRBC2 E3
  modified_base 1..3: mod_base = OTHER; note = 2'O-Methyl ribonucleotide
  modified_base 1..3: mod_base = OTHER; note = Phosphorothioate linkage
  modified_base 108..110: mod_base = OTHER; note = 2'O-Methyl ribonucleotide
  modified_base 107..109: mod_base = OTHER; note = Phosphorothioate linkage
ggagacaaccagcgagccctacgttgagaatcgaaagattcttaataaggcatccttccgatgctgacttctcaccgtccgttttccaataggagcgggcggtatgtttt

SEQ ID NO: 314 - RNA, 110 nt, synthetic construct
  source 1..110: mol_type = other RNA
  misc_feature 1..110: note = Category: MG3-6/3-4 sgRNA targeting TRBC2
  misc_feature 1..110: note = Description: MG3-6/3-4 TRBC2 F3
  modified_base 1..3: mod_base = OTHER; note = 2'O-Methyl ribonucleotide
  modified_base 1..3: mod_base = OTHER; note = Phosphorothioate linkage
  modified_base 108..110: mod_base = OTHER; note = 2'O-Methyl ribonucleotide
  modified_base 107..109: mod_base = OTHER; note = Phosphorothioate linkage
tactcctgctgtgccatagcccgttgagaatcgaaagattcttaataaggcatccttccgatgctgacttctcaccgtccgttttccaataggagcgggcggtatgtttt

SEQ ID NO: 315 - RNA, 110 nt, synthetic construct
  source 1..110: mol_type = other RNA
  misc_feature 1..110: note = Category: MG3-6/3-4 sgRNA targeting TRBC2
  misc_feature 1..110: note = Description: MG3-6/3-4 TRBC2 G3
  modified_base 1..3: mod_base = OTHER; note = 2'O-Methyl ribonucleotide
  modified_base 1..3: mod_base = OTHER; note = Phosphorothioate linkage
  modified_base 108..110: mod_base = OTHER; note = 2'O-Methyl ribonucleotide
  modified_base 107..109: mod_base = OTHER; note = Phosphorothioate linkage
ctgtgccatagcccctgaaaccgttgagaatcgaaagattcttaataaggcatccttccgatgctgacttctcaccgtccgttttccaataggagcgggcggtatgtttt

SEQ ID NO: 316 - RNA, 110 nt, synthetic construct
  source 1..110: mol_type = other RNA
  misc_feature 1..110: note = Category: MG3-6/3-4 sgRNA targeting TRBC2
  misc_feature 1..110: note = Description: MG3-6/3-4 TRBC2 H3
  modified_base 1..3: mod_base = OTHER; note = 2'O-Methyl ribonucleotide
  modified_base 1..3: mod_base = OTHER; note = Phosphorothioate linkage
  modified_base 108..110: mod_base = OTHER; note = 2'O-Methyl ribonucleotide
  modified_base 107..109: mod_base = OTHER; note = Phosphorothioate linkage
tgtgccatagcccctgaaacccgttgagaatcgaaagattcttaataaggcatccttccgatgctgacttctcaccgtccgttttccaataggagcgggcggtatgtttt

SEQ ID NO: 317 - RNA, 110 nt, synthetic construct
  source 1..110: mol_type = other RNA
  misc_feature 1..110: note = Category: MG3-6/3-4 sgRNA targeting TRBC2
  misc_feature 1..110: note = Description: MG3-6/3-4 TRBC2 A4
  modified_base 1..3: mod_base = OTHER; note = 2'O-Methyl ribonucleotide
  modified_base 1..3: mod_base = OTHER; note = Phosphorothioate linkage
  modified_base 108..110: mod_base = OTHER; note = 2'O-Methyl ribonucleotide
  modified_base 107..109: mod_base = OTHER; note = Phosphorothioate linkage
gtgccatagcccctgaaaccctgttgagaatcgaaagattcttaataaggcatccttccgatgctgacttctcaccgtccgttttccaataggagcgggcggtatgtttt

SEQ ID NO: 318 - RNA, 110 nt, synthetic construct
  source 1..110: mol_type = other RNA
  misc_feature 1..110: note = Category: MG3-6/3-4 sgRNA targeting TRBC2
  misc_feature 1..110: note = Description: MG3-6/3-4 TRBC2 B4
  modified_base 1..3: mod_base = OTHER; note = 2'O-Methyl ribonucleotide
  modified_base 1..3: mod_base = OTHER; note = Phosphorothioate linkage
  modified_base 108..110: mod_base = OTHER; note = 2'O-Methyl ribonucleotide
  modified_base 107..109: mod_base = OTHER; note = Phosphorothioate linkage
tgttctctcttccacaggtcaagttgagaatcgaaagattcttaataaggcatccttccgatgctgacttctcaccgtccgttttccaataggagcgggcggtatgtttt

SEQ ID NO: 319 - RNA, 110 nt, synthetic construct
  source 1..110: mol_type = other RNA
  misc_feature 1..110: note = Category: MG3-6/3-4 sgRNA targeting TRBC2
  misc_feature 1..110: note = Description: MG3-6/3-4 TRBC2 C4
  modified_base 1..3: mod_base = OTHER; note = 2'O-Methyl ribonucleotide
  modified_base 1..3: mod_base = OTHER; note = Phosphorothioate linkage
  modified_base 108..110: mod_base = OTHER; note = 2'O-Methyl ribonucleotide
  modified_base 107..109: mod_base = OTHER; note = Phosphorothioate linkage
gaaaggattccagaggctagctgttgagaatcgaaagattcttaataaggcatccttccgatgctgacttctcaccgtccgttttccaataggagcgggcggtatgtttt

SEQ ID NO: 320 - RNA, 110 nt, synthetic construct
  source 1..110: mol_type = other RNA
  misc_feature 1..110: note = Category: MG3-6/3-4 sgRNA targeting TRBC2
  misc_feature 1..110: note = Description: MG3-6/3-4 TRBC2 D4
  modified_base 1..3: mod_base = OTHER; note = 2'O-Methyl ribonucleotide
  modified_base 1..3: mod_base = OTHER; note = Phosphorothioate linkage
  modified_base 108..110: mod_base = OTHER; note = 2'O-Methyl ribonucleotide
  modified_base 107..109: mod_base = OTHER; note = Phosphorothioate linkage
ggatggttttggagctagcctcgttgagaatcgaaagattcttaataaggcatccttccgatgctgacttctcaccgtccgttttccaataggagcgggcggtatgtttt

SEQ ID NO: 321 - RNA, 110 nt, synthetic construct
  source 1..110: mol_type = other RNA
  misc_feature 1..110: note = Category: MG3-6/3-4 sgRNA targeting TRBC2
  misc_feature 1..110: note = Description: MG3-6/3-4 TRBC2 E4
  modified_base 1..3: mod_base = OTHER; note = 2'O-Methyl ribonucleotide
  modified_base 1..3: mod_base = OTHER; note = Phosphorothioate linkage
  modified_base 108..110: mod_base = OTHER; note = 2'O-Methyl ribonucleotide
  modified_base 107..109: mod_base = OTHER; note = Phosphorothioate linkage
ccctggttcgagagcagagacggttgagaatcgaaagattcttaataaggcatccttccgatgctgacttctcaccgtccgttttccaataggagcgggcggtatgtttt

SEQ ID NO: 322 - RNA, 110 nt, synthetic construct
  source 1..110: mol_type = other RNA
  misc_feature 1..110: note = Category: MG3-6/3-4 sgRNA targeting TRBC2
  misc_feature 1..110: note = Description: MG3-6/3-4 TRBC2 F4
  modified_base 1..3: mod_base = OTHER; note = 2'O-Methyl ribonucleotide
  modified_base 1..3: mod_base = OTHER; note = Phosphorothioate linkage
  modified_base 108..110: mod_base = OTHER; note = 2'O-Methyl ribonucleotide
  modified_base 107..109: mod_base = OTHER; note = Phosphorothioate linkage
agcagagacggcgaaagatagagttgagaatcgaaagattcttaataaggcatccttccgatgctgacttctcaccgtccgttttccaataggagcgggcggtatgtttt

SEQ ID NO: 323 - RNA, 110 nt, synthetic construct
  source 1..110: mol_type = other RNA
  misc_feature 1..110: note = Category: MG3-6/3-4 sgRNA targeting TRBC2
  misc_feature 1..110: note = Description: MG3-6/3-4 TRBC2 G4
  modified_base 1..3: mod_base = OTHER; note = 2'O-Methyl ribonucleotide
  modified_base 1..3: mod_base = OTHER; note = Phosphorothioate linkage
  modified_base 108..110: mod_base = OTHER; note = 2'O-Methyl ribonucleotide
  modified_base 107..109: mod_base = OTHER; note = Phosphorothioate linkage
gcagagacggcgaaagatagaggttgagaatcgaaagattcttaataaggcatccttccgatgctgacttctcaccgtccgttttccaataggagcgggcggtatgtttt

SEQ ID NO: 324 - RNA, 110 nt, synthetic construct
  source 1..110: mol_type = other RNA
  misc_feature 1..110: note = Category: MG3-6/3-4 sgRNA targeting TRBC2
  misc_feature 1..110: note = Description: MG3-6/3-4 TRBC2 H4
  modified_base 1..3: mod_base = OTHER; note = 2'O-Methyl ribonucleotide
  modified_base 1..3: mod_base = OTHER; note = Phosphorothioate linkage
  modified_base 108..110: mod_base = OTHER; note = 2'O-Methyl ribonucleotide
  modified_base 107..109: mod_base = OTHER; note = Phosphorothioate linkage
cagagacggcgaaagatagagagttgagaatcgaaagattcttaataaggcatccttccgatgctgacttctcaccgtccgttttccaataggagcgggcggtatgtttt

SEQ ID NO: 325 - RNA, 110 nt, synthetic construct
  source 1..110: mol_type = other RNA
  misc_feature 1..110: note = Category: MG3-6/3-4 sgRNA targeting TRBC2
  misc_feature 1..110: note = Description: MG3-6/3-4 TRBC2 A5
  modified_base 1..3: mod_base = OTHER; note = 2'O-Methyl ribonucleotide
  modified_base 1..3: mod_base = OTHER; note = Phosphorothioate linkage
  modified_base 108..110: mod_base = OTHER; note = 2'O-Methyl ribonucleotide
  modified_base 107..109: mod_base = OTHER; note = Phosphorothioate linkage
ttaccggaggtgaagccacagtgttgagaatcgaaagattcttaataaggcatccttccgatgctgacttctcaccgtccgttttccaataggagcgggcggtatgtttt

SEQ ID NO: 326 - RNA, 110 nt, synthetic construct
  source 1..110: mol_type = other RNA
  misc_feature 1..110: note = Category: MG3-6/3-4 sgRNA targeting TRBC2
  misc_feature 1..110: note = Description: MG3-6/3-4 TRBC2 B5
  modified_base 1..3: mod_base = OTHER; note = 2'O-Methyl ribonucleotide
  modified_base 1..3: mod_base = OTHER; note = Phosphorothioate linkage
  modified_base 108..110: mod_base = OTHER; note = 2'O-Methyl ribonucleotide
  modified_base 107..109: mod_base = OTHER; note = Phosphorothioate linkage
cggaggtgaagccacagtctgagttgagaatcgaaagattcttaataaggcatccttccgatgctgacttctcaccgtccgttttccaataggagcgggcggtatgtttt

SEQ ID NO: 327 - RNA, 110 nt, synthetic construct
  source 1..110: mol_type = other RNA
  misc_feature 1..110: note = Category: MG3-6/3-4 sgRNA targeting TRBC2
  misc_feature 1..110: note = Description: MG3-6/3-4 TRBC2 C5
  modified_base 1..3: mod_base = OTHER; note = 2'O-Methyl ribonucleotide
  modified_base 1..3: mod_base = OTHER; note = Phosphorothioate linkage
  modified_base 108..110: mod_base = OTHER; note = 2'O-Methyl ribonucleotide
  modified_base 107..109: mod_base = OTHER; note = Phosphorothioate linkage
ggaggtgaagccacagtctgaagttgagaatcgaaagattcttaataaggcatccttccgatgctgacttctcaccgtccgttttccaataggagcgggcggtatgtttt

SEQ ID NO: 328 - RNA, 110 nt, synthetic construct
  source 1..110: mol_type = other RNA
  misc_feature 1..110: note = Category: MG3-6/3-4 sgRNA targeting TRBC2
  misc_feature 1..110: note = Description: MG3-6/3-4 TRBC2 D5
  modified_base 1..3: mod_base = OTHER; note = 2'O-Methyl ribonucleotide
  modified_base 1..3: mod_base = OTHER; note = Phosphorothioate linkage
  modified_base 108..110: mod_base = OTHER; note = 2'O-Methyl ribonucleotide
  modified_base 107..109: mod_base = OTHER; note = Phosphorothioate linkage
acagtctgaaagaaaacagggggttgagaatcgaaagattcttaataaggcatccttccgatgctgacttctcaccgtccgttttccaataggagcgggcggtatgtttt

SEQ ID NO: 329 - RNA, 110 nt, synthetic construct
  source 1..110: mol_type = other RNA
  misc_feature 1..110: note = Category: MG3-6/3-4 sgRNA targeting TRBC2
  misc_feature 1..110: note = Description: MG3-6/3-4 TRBC2 E5
  modified_base 1..3: mod_base = OTHER; note = 2'O-Methyl ribonucleotide
  modified_base 1..3: mod_base = OTHER; note = Phosphorothioate linkage
  modified_base 108..110: mod_base = OTHER; note = 2'O-Methyl ribonucleotide
  modified_base 107..109: mod_base = OTHER; note = Phosphorothioate linkage
cagtctgaaagaaaacaggggagttgagaatcgaaagattcttaataaggcatccttccgatgctgacttctcaccgtccgttttccaataggagcgggcggtatgtttt

SEQ ID NO: 330 - RNA, 110 nt, synthetic construct
  source 1..110: mol_type = other RNA
  misc_feature 1..110: note = Category: MG3-6/3-4 sgRNA targeting TRBC2
  misc_feature 1..110: note = Description: MG3-6/3-4 TRBC2 F5
  modified_base 1..3: mod_base = OTHER; note = 2'O-Methyl ribonucleotide
  modified_base 1..3: mod_base = OTHER; note = Phosphorothioate linkage
  modified_base 108..110: mod_base = OTHER; note = 2'O-Methyl ribonucleotide
  modified_base 107..109: mod_base = OTHER; note = Phosphorothioate linkage
agtctgaaagaaaacaggggaagttgagaatcgaaagattcttaataaggcatccttccgatgctgacttctcaccgtccgttttccaataggagcgggcggtatgtttt

SEQ ID NO: 331 - RNA, 110 nt, synthetic construct
  source 1..110: mol_type = other RNA
  misc_feature 1..110: note = Category: MG3-6/3-4 sgRNA targeting TRBC2
  misc_feature 1..110: note = Description: MG3-6/3-4 TRBC2 G5
  modified_base 1..3: mod_base = OTHER; note = 2'O-Methyl ribonucleotide
  modified_base 1..3: mod_base = OTHER; note = Phosphorothioate linkage
  modified_base 108..110: mod_base = OTHER; note = 2'O-Methyl ribonucleotide
  modified_base 107..109: mod_base = OTHER; note = Phosphorothioate linkage
gtctgaaagaaaacaggggaaggttgagaatcgaaagattcttaataaggcatccttccgatgctgacttctcaccgtccgttttccaataggagcgggcggtatgtttt

SEQ ID NO: 332 - RNA, 110 nt, synthetic construct
  source 1..110: mol_type = other RNA
  misc_feature 1..110: note = Category: MG3-6/3-4 sgRNA targeting TRBC2
  misc_feature 1..110: note = Description: MG3-6/3-4 TRBC2 H5
  modified_base 1..3: mod_base = OTHER; note = 2'O-Methyl ribonucleotide
  modified_base 1..3: mod_base = OTHER; note = Phosphorothioate linkage
  modified_base 108..110: mod_base = OTHER; note = 2'O-Methyl ribonucleotide
  modified_base 107..109: mod_base = OTHER; note = Phosphorothioate linkage
acaggggaagaaaaatggatgagttgagaatcgaaagattcttaataaggcatccttccgatgctgacttctcaccgtccgttttccaataggagcgggcggtatgtttt

SEQ ID NO: 333 - RNA, 110 nt, synthetic construct
  source 1..110: mol_type = other RNA
  misc_feature 1..110: note = Category: MG3-6/3-4 sgRNA targeting TRBC2
  misc_feature 1..110: note = Description: MG3-6/3-4 TRBC2 A6
  modified_base 1..3: mod_base = OTHER; note = 2'O-Methyl ribonucleotide
  modified_base 1..3: mod_base = OTHER; note = Phosphorothioate linkage
  modified_base 108..110: mod_base = OTHER; note = 2'O-Methyl ribonucleotide
  modified_base 107..109: mod_base = OTHER; note = Phosphorothioate linkage
gcgaagtggtcactatgatcttgttgagaatcgaaagattcttaataaggcatccttccgatgctgacttctcaccgtccgttttccaataggagcgggcggtatgtttt

SEQ ID NO: 334 - RNA, 110 nt, synthetic construct
  source 1..110: mol_type = other RNA
  misc_feature 1..110: note = Category: MG3-6/3-4 sgRNA targeting TRBC2
  misc_feature 1..110: note = Description: MG3-6/3-4 TRBC2 B6
  modified_base 1..3: mod_base = OTHER; note = 2'O-Methyl ribonucleotide
  modified_base 1..3: mod_base = OTHER; note = Phosphorothioate linkage
  modified_base 108..110: mod_base = OTHER; note = 2'O-Methyl ribonucleotide
  modified_base 107..109: mod_base = OTHER; note = Phosphorothioate linkage
ttaggaaaccaggaccccagaagttgagaatcgaaagattcttaataaggcatccttccgatgctgacttctcaccgtccgttttccaataggagcgggcggtatgtttt

SEQ ID NO: 335 - RNA, 110 nt, synthetic construct
  source 1..110: mol_type = other RNA
  misc_feature 1..110: note = Category: MG3-6/3-4 sgRNA targeting TRBC2
  misc_feature 1..110: note = Description: MG3-6/3-4 TRBC2 C6
  modified_base 1..3: mod_base = OTHER; note = 2'O-Methyl ribonucleotide
  modified_base 1..3: mod_base = OTHER; note = Phosphorothioate linkage
  modified_base 108..110: mod_base = OTHER; note = 2'O-Methyl ribonucleotide
  modified_base 107..109: mod_base = OTHER; note = Phosphorothioate linkage
tatggctggtcctcagggagacgttgagaatcgaaagattcttaataaggcatccttccgatgctgacttctcaccgtccgttttccaataggagcgggcggtatgtttt

SEQ ID NO: 336 - RNA, 110 nt, synthetic construct
  source 1..110: mol_type = other RNA
  misc_feature 1..110: note = Category: MG3-6/3-4 sgRNA targeting TRBC2
  misc_feature 1..110: note = Description: MG3-6/3-4 TRBC2 D6
  modified_base 1..3: mod_base = OTHER; note = 2'O-Methyl ribonucleotide
  modified_base 1..3: mod_base = OTHER; note = Phosphorothioate linkage
  modified_base 108..110: mod_base = OTHER; note = 2'O-Methyl ribonucleotide
  modified_base 107..109: mod_base = OTHER; note = Phosphorothioate linkage
ctaaggtgtcaggatctgaagggttgagaatcgaaagattcttaataaggcatccttccgatgctgacttctcaccgtccgttttccaataggagcgggcggtatgtttt

SEQ ID NO: 337 - RNA, 110 nt, synthetic construct
  source 1..110: mol_type = other RNA
  misc_feature 1..110: note = Category: MG3-6/3-4 sgRNA targeting TRBC2
  misc_feature 1..110: note = Description: MG3-6/3-4 TRBC2 E6
  modified_base 1..3: mod_base = OTHER; note = 2'O-Methyl ribonucleotide
  modified_base 1..3: mod_base = OTHER; note = Phosphorothioate linkage
  modified_base 108..110: mod_base = OTHER; note = 2'O-Methyl ribonucleotide
  modified_base 107..109: mod_base = OTHER; note = Phosphorothioate linkage
ggaacacgtttttcaggtcctcgttgagaatcgaaagattcttaataaggcatccttccgatgctgacttctcaccgtccgttttccaataggagcgggcggtatgtttt

SEQ ID NO: 338 - DNA, 22 bp, Homo sapiens
  source 1..22: mol_type = genomic DNA
  misc_feature 1..22: note = Category: DNA sequence of TRBC2 target site
  misc_feature 1..22: note = Description: MG3-6/3-4 TRBC2 A1
acctcttccctttccagaggac

SEQ ID NO: 339 - DNA, 22 bp, Homo sapiens
  source 1..22: mol_type = genomic DNA
  misc_feature 1..22: note = Category: DNA sequence of TRBC2 target site
  misc_feature 1..22: note = Description: MG3-6/3-4 TRBC2 B1
cctcttccctttccagaggacc

SEQ ID NO: 340 - DNA, 22 bp, Homo sapiens
  source 1..22: mol_type = genomic DNA
  misc_feature 1..22: note = Category: DNA sequence of TRBC2 target site
  misc_feature 1..22: note = Description: MG3-6/3-4 TRBC2 C1
ctcttccctttccagaggacct

SEQ ID NO: 341 - DNA, 22 bp, Homo sapiens
  source 1..22: mol_type = genomic DNA
  misc_feature 1..22: note = Category: DNA sequence of TRBC2 target site
  misc_feature 1..22: note = Description: MG3-6/3-4 TRBC2 D1
cagaagcagagatctcccacac

SEQ ID NO: 342 - DNA, 22 bp, Homo sapiens
  source 1..22: mol_type = genomic DNA
  misc_feature 1..22: note = Category: DNA sequence of TRBC2 target site
  misc_feature 1..22: note = Description: MG3-6/3-4 TRBC2 E1
ccacgtggagctgagctggtgg

SEQ ID NO: 343 - DNA, 22 bp, Homo sapiens
  source 1..22: mol_type = genomic DNA
  misc_feature 1..22: note = Category: DNA sequence of TRBC2 target site
  misc_feature 1..22: note = Description: MG3-6/3-4 TRBC2 F1
agtccagttctacgggctctcg

SEQ ID NO: 344 - DNA, 22 bp, Homo sapiens
  source 1..22: mol_type = genomic DNA
  misc_feature 1..22: note = Category: DNA sequence of TRBC2 target site
  misc_feature 1..22: note = Description: MG3-6/3-4 TRBC2 G1
gattaggtgagaccagctacca

SEQ ID NO: 345 - DNA, 22 bp, Homo sapiens
  source 1..22: mol_type = genomic DNA
  misc_feature 1..22: note = Category: DNA sequence of TRBC2 target site
  misc_feature 1..22: note = Description: MG3-6/3-4 TRBC2 H1
attaggtgagaccagctaccag

SEQ ID NO: 346 - DNA, 22 bp, Homo sapiens
  source 1..22: mol_type = genomic DNA
  misc_feature 1..22: note = Category: DNA sequence of TRBC2 target site
  misc_feature 1..22: note = Description: MG3-6/3-4 TRBC2 A2
ttaggtgagaccagctaccagg

SEQ ID NO: 347 - DNA, 22 bp, Homo sapiens
  source 1..22: mol_type = genomic DNA
  misc_feature 1..22: note = Category: DNA sequence of TRBC2 target site
  misc_feature 1..22: note = Description: MG3-6/3-4 TRBC2 B2
tgagaccagctaccagggaaaa

SEQ ID NO: 348 - DNA, 22 bp, Homo sapiens
  source 1..22: mol_type = genomic DNA
  misc_feature 1..22: note = Category: DNA sequence of TRBC2 target site
  misc_feature 1..22: note = Description: MG3-6/3-4 TRBC2 C2
tagcggacaagactagatccag

SEQ ID NO: 349 - DNA, 22 bp, Homo sapiens
  source 1..22: mol_type = genomic DNA
  misc_feature 1..22: note = Category: DNA sequence of TRBC2 target site
  misc_feature 1..22: note = Description: MG3-6/3-4 TRBC2 D2
cccccaccaagaagcatagagg

SEQ ID NO: 350 - DNA, 22 bp, Homo sapiens
  source 1..22: mol_type = genomic DNA
  misc_feature 1..22: note = Category: DNA sequence of TRBC2 target site
  misc_feature 1..22: note = Description: MG3-6/3-4 TRBC2 E2
tctgctctcgaaccagggcatg

SEQ ID NO: 351 - DNA, 22 bp, Homo sapiens
  source 1..22: mol_type = genomic DNA
  misc_feature 1..22: note = Category: DNA sequence of TRBC2 target site
  misc_feature 1..22: note = Description: MG3-6/3-4 TRBC2 F2
ggaacatcacacatgggcataa

SEQ ID NO: 352 - DNA, 22 bp, Homo sapiens
  source 1..22: mol_type = genomic DNA
  misc_feature 1..22: note = Category: DNA sequence of TRBC2 target site
  misc_feature 1..22: note = Description: MG3-6/3-4 TRBC2 G2
cctaatatatcctatcacctca

SEQ ID NO: 353 - DNA, 22 bp, Homo sapiens
  source 1..22: mol_type = genomic DNA
  misc_feature 1..22: note = Category: DNA sequence of TRBC2 target site
  misc_feature 1..22: note = Description: MG3-6/3-4 TRBC2 H2
accataatgaagccagactggg

SEQ ID NO: 354 - DNA, 22 bp, Homo sapiens
  source 1..22: mol_type = genomic DNA
  misc_feature 1..22: note = Category: DNA sequence of TRBC2 target site
  misc_feature 1..22: note = Description: MG3-6/3-4 TRBC2 A3
ccataatgaagccagactgggg

SEQ ID NO: 355 - DNA, 22 bp, Homo sapiens
  source 1..22: mol_type = genomic DNA
  misc_feature 1..22: note = Category: DNA sequence of TRBC2 target site
  misc_feature 1..22: note = Description: MG3-6/3-4 TRBC2 B3
cataatgaagccagactgggga

SEQ ID NO: 356 - DNA, 22 bp, Homo sapiens
  source 1..22: mol_type = genomic DNA
  misc_feature 1..22: note = Category: DNA sequence of TRBC2 target site
  misc_feature 1..22: note = Description: MG3-6/3-4 TRBC2 C3
gccagactggggagaaaatgca

SEQ ID NO: 357 - DNA, 22 bp, Homo sapiens
  source 1..22: mol_type = genomic DNA
  misc_feature 1..22: note = Category: DNA sequence of TRBC2 target site
  misc_feature 1..22: note = Description: MG3-6/3-4 TRBC2 D3
ggagaaaatgcagggaatatca

SEQ ID NO: 358 - DNA, 22 bp, Homo sapiens
  source 1..22: mol_type = genomic DNA
  misc_feature 1..22: note = Category: DNA sequence of TRBC2 target site
  misc_feature 1..22: note = Description: MG3-6/3-4 TRBC2 E3
ggagacaaccagcgagccctac

SEQ ID NO: 359 - DNA, 22 bp, Homo sapiens
  source 1..22: mol_type = genomic DNA
  misc_feature 1..22: note = Category: DNA sequence of TRBC2 target site
  misc_feature 1..22: note = Description: MG3-6/3-4 TRBC2 F3
tactcctgctgtgccatagccc

SEQ ID NO: 360 - DNA, 22 bp, Homo sapiens
  source 1..22: mol_type = genomic DNA
  misc_feature 1..22: note = Category: DNA sequence of TRBC2 target site
  misc_feature 1..22: note = Description: MG3-6/3-4 TRBC2 G3
ctgtgccatagcccctgaaacc

SEQ ID NO: 361 - DNA, 22 bp, Homo sapiens
  source 1..22: mol_type = genomic DNA
  misc_feature 1..22: note = Category: DNA sequence of TRBC2 target site
  misc_feature 1..22: note = Description: MG3-6/3-4 TRBC2 H3
tgtgccatagcccctgaaaccc

SEQ ID NO: 362 - DNA, 22 bp, Homo sapiens
  source 1..22: mol_type = genomic DNA
  misc_feature 1..22: note = Category: DNA sequence of TRBC2 target site
  misc_feature 1..22: note = Description: MG3-6/3-4 TRBC2 A4
gtgccatagcccctgaaaccct

SEQ ID NO: 363 - DNA, 22 bp, Homo sapiens
  source 1..22: mol_type = genomic DNA
  misc_feature 1..22: note = Category: DNA sequence of TRBC2 target site
  misc_feature 1..22: note = Description: MG3-6/3-4 TRBC2 B4
tgttctctcttccacaggtcaa

SEQ ID NO: 364 - DNA, 22 bp, Homo sapiens
  source 1..22: mol_type = genomic DNA
  misc_feature 1..22: note = Category: DNA sequence of TRBC2 target site
  misc_feature 1..22: note = Description: MG3-6/3-4 TRBC2 C4
gaaaggattccagaggctagct

SEQ ID NO: 365 - DNA, 22 bp, Homo sapiens
  source 1..22: mol_type = genomic DNA
  misc_feature 1..22: note = Category: DNA sequence of TRBC2 target site
  misc_feature 1..22: note = Description: MG3-6/3-4 TRBC2 D4
ggatggttttggagctagcctc

SEQ ID NO: 366 - DNA, 22 bp, Homo sapiens
  source 1..22: mol_type = genomic DNA
  misc_feature 1..22: note = Category: DNA sequence of TRBC2 target site
  misc_feature 1..22: note = Description: MG3-6/3-4 TRBC2 E4
ccctggttcgagagcagagacg

SEQ ID NO: 367 - DNA, 22 bp, Homo sapiens
  source 1..22: mol_type = genomic DNA
  misc_feature 1..22: note = Category: DNA sequence of TRBC2 target site
  misc_feature 1..22: note = Description: MG3-6/3-4 TRBC2 F4
agcagagacggcgaaagataga

SEQ ID NO: 368 - DNA, 22 bp, Homo sapiens
  source 1..22: mol_type = genomic DNA
  misc_feature 1..22: note = Category: DNA sequence of TRBC2 target site
  misc_feature 1..22: note = Description: MG3-6/3-4 TRBC2 G4
gcagagacggcgaaagatagag

SEQ ID NO: 369 - DNA, 22 bp, Homo sapiens
  source 1..22: mol_type = genomic DNA
  misc_feature 1..22: note = Category: DNA sequence of TRBC2 target site
  misc_feature 1..22: note = Description: MG3-6/3-4 TRBC2 H4
cagagacggcgaaagatagaga

SEQ ID NO: 370 - DNA, 22 bp, Homo sapiens
  source 1..22: mol_type = genomic DNA
  misc_feature 1..22: note = Category: DNA sequence of TRBC2 target site
  misc_feature 1..22: note = Description: MG3-6/3-4 TRBC2 A5
ttaccggaggtgaagccacagt

SEQ ID NO: 371 - DNA, 22 bp, Homo sapiens
  source 1..22: mol_type = genomic DNA
  misc_feature 1..22: note = Category: DNA sequence of TRBC2 target site
  misc_feature 1..22: note = Description: MG3-6/3-4 TRBC2 B5
cggaggtgaagccacagtctga

SEQ ID NO: 372 - DNA, 22 bp, Homo sapiens
  source 1..22: mol_type = genomic DNA
  misc_feature 1..22: note = Category: DNA sequence of TRBC2 target site
  misc_feature 1..22: note = Description: MG3-6/3-4 TRBC2 C5
ggaggtgaagccacagtctgaa

SEQ ID NO: 373 - DNA, 22 bp, Homo sapiens
  source 1..22: mol_type = genomic DNA
  misc_feature 1..22: note = Category: DNA sequence of TRBC2 target site
  misc_feature 1..22: note = Description: MG3-6/3-4 TRBC2 D5
acagtctgaaagaaaacagggg

SEQ ID NO: 374 - DNA, 22 bp, Homo sapiens
  source 1..22: mol_type = genomic DNA
  misc_feature 1..22: note = Category: DNA sequence of TRBC2 target site
  misc_feature 1..22: note = Description: MG3-6/3-4 TRBC2 E5
cagtctgaaagaaaacagggga

SEQ ID NO: 375 - DNA, 22 bp, Homo sapiens
  source 1..22: mol_type = genomic DNA
  misc_feature 1..22: note = Category: DNA sequence of TRBC2 target site
  misc_feature 1..22: note = Description: MG3-6/3-4 TRBC2 F5
agtctgaaagaaaacaggggaa

SEQ ID NO: 376 - DNA, 22 bp, Homo sapiens
  source 1..22: mol_type = genomic DNA
  misc_feature 1..22: note = Category: DNA sequence of TRBC2 target site
  misc_feature 1..22: note = Description: MG3-6/3-4 TRBC2 G5
gtctgaaagaaaacaggggaag

SEQ ID NO: 377 - DNA, 22 bp, Homo sapiens
  source 1..22: mol_type = genomic DNA
  misc_feature 1..22: note = Category: DNA sequence of TRBC2 target site
  misc_feature 1..22: note = Description: MG3-6/3-4 TRBC2 H5
acaggggaagaaaaatggatga

SEQ ID NO: 378 - DNA, 22 bp, Homo sapiens
  source 1..22: mol_type = genomic DNA
  misc_feature 1..22: note = Category: DNA sequence of TRBC2 target site
  misc_feature 1..22: note = Description: MG3-6/3-4 TRBC2 A6
gcgaagtggtcactatgatctt

SEQ ID NO: 379 - DNA, 22 bp, Homo sapiens
  source 1..22: mol_type = genomic DNA
  misc_feature 1..22: note = Category: DNA sequence of TRBC2 target site
  misc_feature 1..22: note = Description: MG3-6/3-4 TRBC2 B6
ttaggaaaccaggaccccagaa

SEQ ID NO: 380 - DNA, 22 bp, Homo sapiens
  source 1..22: mol_type = genomic DNA
  misc_feature 1..22: note = Category: DNA sequence of TRBC2 target site
  misc_feature 1..22: note = Description: MG3-6/3-4 TRBC2 C6
tatggctggtcctcagggagac

SEQ ID NO: 381 - DNA, 22 bp, Homo sapiens
  source 1..22: mol_type = genomic DNA
  misc_feature 1..22: note = Category: DNA sequence of TRBC2 target site
  misc_feature 1..22: note = Description: MG3-6/3-4 TRBC2 D6
ctaaggtgtcaggatctgaagg

SEQ ID NO: 382 - DNA, 22 bp, Homo sapiens
  source 1..22: mol_type = genomic DNA
  misc_feature 1..22: note = Category: DNA sequence of TRBC2 target site
  misc_feature 1..22: note = Description: MG3-6/3-4 TRBC2 E6
ggaacacgtttttcaggtcctc

SEQ ID NO: 383 - RNA, 110 nt, synthetic construct
  source 1..110: mol_type = other RNA
  misc_feature 1..110: note = Category: MG3-6/3-4 sgRNA targeting ANGPTL3
  misc_feature 1..110: note = Description: MG3-6/3-4 ANGPTL3 A1
  modified_base 1..3: mod_base = OTHER; note = 2'O-Methyl ribonucleotide
  modified_base 1..3: mod_base = OTHER; note = Phosphorothioate linkage
  modified_base 108..110: mod_base = OTHER; note = 2'O-Methyl ribonucleotide
  modified_base 107..109: mod_base = OTHER; note = Phosphorothioate linkage
ttgttcctctagttatttcctcgttgagaatcgaaagattcttaataaggcatccttccgatgctgacttctcaccgtccgttttccaataggagcgggcggtatgtttt

SEQ ID NO: 384 - RNA, 110 nt, synthetic construct
  source 1..110: mol_type = other RNA
  misc_feature 1..110: note = Category: MG3-6/3-4 sgRNA targeting ANGPTL3
  misc_feature 1..110: note = Description: MG3-6/3-4 ANGPTL3 B1
  modified_base 1..3: mod_base = OTHER; note = 2'O-Methyl ribonucleotide
  modified_base 1..3: mod_base = OTHER; note = Phosphorothioate linkage
  modified_base 108..110: mod_base = OTHER; note = 2'O-Methyl ribonucleotide
  modified_base 107..109: mod_base = OTHER; note = Phosphorothioate linkage
atttgattctctatctccagaggttgagaatcgaaagattcttaataaggcatccttccgatgctgacttctcaccgtccgttttccaataggagcgggcggtatgtttt

SEQ ID NO: 385 - RNA, 110 nt, synthetic construct
  source 1..110: mol_type = other RNA
  misc_feature 1..110: note = Category: MG3-6/3-4 sgRNA targeting ANGPTL3
  misc_feature 1..110: note = Description: MG3-6/3-4 ANGPTL3 C1
  modified_base 1..3: mod_base = OTHER; note = 2'O-Methyl ribonucleotide
  modified_base 1..3: mod_base = OTHER; note = Phosphorothioate linkage
  modified_base 108..110: mod_base = OTHER; note = 2'O-Methyl ribonucleotide
  modified_base 107..109: mod_base = OTHER; note = Phosphorothioate linkage
tttgattctctatctccagagcgttgagaatcgaaagattcttaataaggcatccttccgatgctgacttctcaccgtccgttttccaataggagcgggcggtatgtttt

SEQ ID NO: 386 - RNA, 110 nt, synthetic construct
  source 1..110: mol_type = other RNA
  misc_feature 1..110: note = Category: MG3-6/3-4 sgRNA targeting ANGPTL3
  misc_feature 1..110: note = Description: MG3-6/3-4 ANGPTL3 D1
  modified_base 1..3: mod_base = OTHER; note = 2'O-Methyl ribonucleotide
  modified_base 1..3: mod_base = OTHER; note = Phosphorothioate linkage
  modified_base 108..110: mod_base = OTHER; note = 2'O-Methyl ribonucleotide
  modified_base 107..109: mod_base = OTHER; note = Phosphorothioate linkage
aagatttgctatgttagacgatgttgagaatcgaaagattcttaataaggcatccttccgatgctgacttctcaccgtccgttttccaataggagcgggcggtatgtttt

SEQ ID NO: 387 - RNA, 110 nt, synthetic construct
  source 1..110: mol_type = other RNA
  misc_feature 1..110: note = Category: MG3-6/3-4 sgRNA targeting ANGPTL3
  misc_feature 1..110: note = Description: MG3-6/3-4 ANGPTL3 E1
  modified_base 1..3: mod_base = OTHER; note = 2'O-Methyl ribonucleotide
  modified_base 1..3: mod_base = OTHER; note = Phosphorothioate linkage
  modified_base 108..110: mod_base = OTHER; note = 2'O-Methyl ribonucleotide
  modified_base 107..109: mod_base = OTHER; note = Phosphorothioate linkage
agatttgctatgttagacgatggttgagaatcgaaagattcttaataaggcatccttccgatgctgacttctcaccgtccgttttccaataggagcgggcggtatgtttt

SEQ ID NO: 388 - RNA, 110 nt, synthetic construct
  source 1..110: mol_type = other RNA
  misc_feature 1..110: note = Category: MG3-6/3-4 sgRNA targeting ANGPTL3
  misc_feature 1..110: note = Description: MG3-6/3-4 ANGPTL3 F1
  modified_base 1..3: mod_base = OTHER; note = 2'O-Methyl ribonucleotide
  modified_base 1..3: mod_base = OTHER; note = Phosphorothioate linkage
  modified_base 108..110: mod_base = OTHER; note = 2'O-Methyl ribonucleotide
  modified_base 107..109: mod_base = OTHER; note = Phosphorothioate linkage
gatttgctatgttagacgatgtgttgagaatcgaaagattcttaataaggcatccttccgatgctgacttctcaccgtccgttttccaataggagcgggcggtatgtttt

SEQ ID NO: 389 - RNA, 110 nt, synthetic construct
  source 1..110: mol_type = other RNA
  misc_feature 1..110: note = Category: MG3-6/3-4 sgRNA targeting ANGPTL3
  misc_feature 1..110: note = Description: MG3-6/3-4 ANGPTL3 G1
  modified_base 1..3: mod_base = OTHER; note = 2'O-Methyl ribonucleotide
  modified_base 1..3: mod_base = OTHER; note = Phosphorothioate linkage
  modified_base 108..110: mod_base = OTHER; note = 2'O-Methyl ribonucleotide
  modified_base 107..109: mod_base = OTHER; note = Phosphorothioate linkage
actttgtccataagacgaaggggttgagaatcgaaagattcttaataaggcatccttccgatgctgacttctcaccgtccgttttccaataggagcgggcggtatgtttt

SEQ ID NO: 390 - RNA, 110 nt, synthetic construct
  source 1..110: mol_type = other RNA
  misc_feature 1..110: note = Category: MG3-6/3-4 sgRNA targeting ANGPTL3
  misc_feature 1..110: note = Description: MG3-6/3-4 ANGPTL3 H1
  modified_base 1..3: mod_base = OTHER; note = 2'O-Methyl ribonucleotide
  modified_base 1..3: mod_base = OTHER; note = Phosphorothioate linkage
  modified_base 108..110: mod_base = OTHER; note = 2'O-Methyl ribonucleotide
  modified_base 107..109: mod_base = OTHER; note = Phosphorothioate linkage
agggccaaattaatgacatattgttgagaatcgaaagattcttaataaggcatccttccgatgctgacttctcaccgtccgttttccaataggagcgggcggtatgtttt

SEQ ID NO: 391 - RNA, 110 nt, synthetic construct
  source 1..110: mol_type = other RNA
  misc_feature 1..110: note = Category: MG3-6/3-4 sgRNA targeting ANGPTL3
  misc_feature 1..110: note = Description: MG3-6/3-4 ANGPTL3 A2
  modified_base 1..3: mod_base = OTHER; note = 2'O-Methyl ribonucleotide
  modified_base 1..3: mod_base = OTHER; note = Phosphorothioate linkage
  modified_base 108..110: mod_base = OTHER; note = 2'O-Methyl ribonucleotide
  modified_base 107..109: mod_base = OTHER; note = Phosphorothioate linkage
gggccaaattaatgacatatttgttgagaatcgaaagattcttaataaggcatccttccgatgctgacttctcaccgtccgttttccaataggagcgggcggtatgtttt

SEQ ID NO: 392 - RNA, 110 nt, synthetic construct
  source 1..110: mol_type = other RNA
  misc_feature 1..110: note = Category: MG3-6/3-4 sgRNA targeting ANGPTL3
  misc_feature 1..110: note = Description: MG3-6/3-4 ANGPTL3 B2
  modified_base 1..3: mod_base = OTHER; note = 2'O-Methyl ribonucleotide
  modified_base 1..3: mod_base = OTHER; note = Phosphorothioate linkage
  modified_base 108..110: mod_base = OTHER; note = 2'O-Methyl ribonucleotide
  modified_base 107..109: mod_base = OTHER; note = Phosphorothioate linkage
tatgatctatcgctgcaaaccagttgagaatcgaaagattcttaataaggcatccttccgatgctgacttctcaccgtccgttttccaataggagcgggcggtatgtttt

SEQ ID NO: 393 - RNA, 110 nt, synthetic construct
  source 1..110: mol_type = other RNA
  misc_feature 1..110: note = Category: MG3-6/3-4 sgRNA targeting ANGPTL3
  misc_feature 1..110: note = Description: MG3-6/3-4 ANGPTL3 C2
  modified_base 1..3: mod_base = OTHER; note = 2'O-Methyl ribonucleotide
  modified_base 1..3: mod_base = OTHER; note = Phosphorothioate linkage
  modified_base 108..110: mod_base = OTHER; note = 2'O-Methyl ribonucleotide
  modified_base 107..109: mod_base = OTHER; note = Phosphorothioate linkage
atgatctatcgctgcaaaccaggttgagaatcgaaagattcttaataaggcatccttccgatgctgacttctcaccgtccgttttccaataggagcgggcggtatgtttt

SEQ ID NO: 394 - RNA, 110 nt, synthetic construct
  source 1..110: mol_type = other RNA
  misc_feature 1..110: note = Category: MG3-6/3-4 sgRNA targeting ANGPTL3
  misc_feature 1..110: note = Description: MG3-6/3-4 ANGPTL3 D2
  modified_base 1..3: mod_base = OTHER; note = 2'O-Methyl ribonucleotide
  modified_base 1..3: mod_base = OTHER; note = Phosphorothioate linkage
  modified_base 108..110: mod_base = OTHER; note = 2'O-Methyl ribonucleotide
  modified_base 107..109: mod_base = OTHER; note = Phosphorothioate linkage
caaaccagtgaaatcaaagaaggttgagaatcgaaagattcttaataaggcatccttccgatgctgacttctcaccgtccgttttccaataggagcgggcggtatgtttt

SEQ ID NO: 395 - RNA, 110 nt, synthetic construct
  source 1..110: mol_type = other RNA
  misc_feature 1..110: note = Category: MG3-6/3-4 sgRNA targeting ANGPTL3
  misc_feature 1..110: note = Description: MG3-6/3-4 ANGPTL3 E2
  modified_base 1..3: mod_base = OTHER; note = 2'O-Methyl ribonucleotide
  modified_base 1..3: mod_base = OTHER; note = Phosphorothioate linkage
  modified_base 108..110: mod_base = OTHER; note = 2'O-Methyl ribonucleotide
  modified_base 107..109: mod_base = OTHER; note = Phosphorothioate linkage
aaaccagtgaaatcaaagaagagttgagaatcgaaagattcttaataaggcatccttccgatgctgacttctcaccgtccgttttccaataggagcgggcggtatgtttt

SEQ ID NO: 396 - RNA, 110 nt, synthetic construct
  source 1..110: mol_type = other RNA
  misc_feature 1..110: note = Category: MG3-6/3-4 sgRNA targeting ANGPTL3
  misc_feature 1..110: note = Description: MG3-6/3-4 ANGPTL3 F2
  modified_base 1..3: mod_base = OTHER; note = 2'O-Methyl ribonucleotide
  modified_base 1..3: mod_base = OTHER; note = Phosphorothioate linkage
  modified_base 108..110: mod_base = OTHER; note = 2'O-Methyl ribonucleotide
  modified_base 107..109: mod_base = OTHER; note = Phosphorothioate linkage
acaagtcaaaaatgaagaggtagttgagaatcgaaagattcttaataaggcatccttccgatgctgacttctcaccgtccgttttccaataggagcgggcggtatgtttt

SEQ ID NO: 397 - RNA, 110 nt, synthetic construct
  source 1..110: mol_type = other RNA
  misc_feature 1..110: note = Category: MG3-6/3-4 sgRNA targeting ANGPTL3
  misc_feature 1..110: note = Description: MG3-6/3-4 ANGPTL3 G2
  modified_base 1..3: mod_base = OTHER; note = 2'O-Methyl ribonucleotide
  modified_base 1..3: mod_base = OTHER; note = Phosphorothioate linkage
  modified_base 108..110: mod_base = OTHER; note = 2'O-Methyl ribonucleotide
  modified_base 107..109: mod_base = OTHER; note = Phosphorothioate linkage
gaatatgtcacttgaactcaacgttgagaatcgaaagattcttaataaggcatccttccgatgctgacttctcaccgtccgttttccaataggagcgggcggtatgtttt

SEQ ID NO: 398 - RNA, 110 nt, synthetic construct
  source 1..110: mol_type = other RNA
  misc_feature 1..110: note = Category: MG3-6/3-4 sgRNA targeting ANGPTL3
  misc_feature 1..110: note = Description: MG3-6/3-4 ANGPTL3 H2
  modified_base 1..3: mod_base = OTHER; note = 2'O-Methyl ribonucleotide
  modified_base 1..3: mod_base = OTHER; note = Phosphorothioate linkage
  modified_base 108..110: mod_base = OTHER; note = 2'O-Methyl ribonucleotide
  modified_base 107..109: mod_base = OTHER; note = Phosphorothioate linkage
tcacttgaactcaactcaaaacgttgagaatcgaaagattcttaataaggcatccttccgatgctgacttctcaccgtccgttttccaataggagcgggcggtatgtttt

SEQ ID NO: 399 - RNA, 110 nt, synthetic construct
  source 1..110: mol_type = other RNA
  misc_feature 1..110: note = Category: MG3-6/3-4 sgRNA targeting ANGPTL3
  misc_feature 1..110: note = Description: MG3-6/3-4 ANGPTL3 A3
  modified_base 1..3: mod_base = OTHER; note = 2'O-Methyl ribonucleotide
  modified_base 1..3: mod_base = OTHER; note = Phosphorothioate linkage
  modified_base 108..110: mod_base = OTHER; note = 2'O-Methyl ribonucleotide
  modified_base 107..109: mod_base = OTHER; note = Phosphorothioate linkage
tcaaaacttgaaagcctcctaggttgagaatcgaaagattcttaataaggcatccttccgatgctgacttctcaccgtccgttttccaataggagcgggcggtatgtttt

SEQ ID NO: 400 - RNA, 110 nt, synthetic construct
  source 1..110: mol_type = other RNA
  misc_feature 1..110: note = Category: MG3-6/3-4 sgRNA targeting ANGPTL3
  misc_feature 1..110: note = Description: MG3-6/3-4 ANGPTL3 B3
  modified_base 1..3: mod_base = OTHER; note = 2'O-Methyl ribonucleotide
  modified_base 1..3: mod_base = OTHER; note = Phosphorothioate linkage
  modified_base 108..110: mod_base = OTHER; note = 2'O-Methyl ribonucleotide
  modified_base 107..109: mod_base = OTHER; note = Phosphorothioate linkage
caaaacttgaaagcctcctagagttgagaatcgaaagattcttaataaggcatccttccgatgctgacttctcaccgtccgttttccaataggagcgggcggtatgtttt

SEQ ID NO: 401 - RNA, 110 nt, synthetic construct
  source 1..110: mol_type = other RNA
  misc_feature 1..110: note = Category: MG3-6/3-4 sgRNA targeting ANGPTL3
  misc_feature 1..110: note = Description: MG3-6/3-4 ANGPTL3 C3
  modified_base 1..3: mod_base = OTHER; note = 2'O-Methyl ribonucleotide
  modified_base 1..3: mod_base = OTHER; note = Phosphorothioate linkage
  modified_base 108..110: mod_base = OTHER; note = 2'O-Methyl ribonucleotide
  modified_base 107..109: mod_base = OTHER; note = Phosphorothioate linkage
aaaacttgaaagcctcctagaagttgagaatcgaaagattcttaataaggcatccttccgatgctgacttctcaccgtccgttttccaataggagcgggcggtatgtttt

SEQ ID NO: 402 - RNA, 110 nt, synthetic construct
  source 1..110: mol_type = other RNA
  misc_feature 1..110: note = Category: MG3-6/3-4 sgRNA targeting ANGPTL3
  misc_feature 1..110: note = Description: MG3-6/3-4 ANGPTL3 D3
  modified_base 1..3: mod_base = OTHER; note = 2'O-Methyl ribonucleotide
  modified_base 1..3: mod_base = OTHER; note = Phosphorothioate linkage
  modified_base 108..110: mod_base = OTHER; note = 2'O-Methyl ribonucleotide
  modified_base 107..109: mod_base = OTHER; note = Phosphorothioate linkage
aaacttgaaagcctcctagaaggttgagaatcgaaagattcttaataaggcatccttccgatgctgacttctcaccgtccgttttccaataggagcgggcggtatgtttt

SEQ ID NO: 403 - RNA, 110 nt, synthetic construct
  source 1..110: mol_type = other RNA
  misc_feature 1..110: note = Category: MG3-6/3-4 sgRNA targeting ANGPTL3
  misc_feature 1..110: note = Description: MG3-6/3-4 ANGPTL3 E3
  modified_base 1..3: mod_base = OTHER; note = 2'O-Methyl ribonucleotide
  modified_base 1..3: mod_base = OTHER; note = Phosphorothioate linkage
  modified_base 108..110: mod_base = OTHER; note = 2'O-Methyl ribonucleotide
  modified_base 107..109: mod_base = OTHER; note = Phosphorothioate linkage
aacttgaaagcctcctagaagagttgagaatcgaaagattcttaataaggcatccttccgatgctgacttctcaccgtccgttttccaataggagcgggcggtatgtttt

SEQ ID NO: 404 - RNA, 110 nt, synthetic construct
  source 1..110: mol_type = other RNA
  misc_feature 1..110: note = Category: MG3-6/3-4 sgRNA targeting ANGPTL3
  misc_feature 1..110: note = Description: MG3-6/3-4 ANGPTL3 F3
  modified_base 1..3: mod_base = OTHER; note = 2'O-Methyl ribonucleotide
  modified_base 1..3: mod_base = OTHER; note = Phosphorothioate linkage
  modified_base 108..110: mod_base = OTHER; note = 2'O-Methyl ribonucleotide
  modified_base 107..109: mod_base = OTHER; note = Phosphorothioate linkage
gttctggagtttcaggttgattgttgagaatcgaaagattcttaataaggcatccttccgatgctgacttctcaccgtccgttttccaataggagcgggcggtatgtttt

SEQ ID NO: 405 - RNA, 110 nt, synthetic construct
  source 1..110: mol_type = other RNA
  misc_feature 1..110: note = Category: MG3-6/3-4 sgRNA targeting ANGPTL3
  misc_feature 1..110: note = Description: MG3-6/3-4 ANGPTL3 G3
  modified_base 1..3: mod_base = OTHER; note = 2'O-Methyl ribonucleotide
  modified_base 1..3: mod_base = OTHER; note = Phosphorothioate linkage
  modified_base 108..110: mod_base = OTHER; note = 2'O-Methyl ribonucleotide
  modified_base 107..109: mod_base = OTHER; note = Phosphorothioate linkage
cactggtttgcagcgatagatcgttgagaatcgaaagattcttaataaggcatccttccgatgctgacttctcaccgtccgttttccaataggagcgggcggtatgtttt

SEQ ID NO: 406 - RNA, 110 nt, synthetic construct
  source 1..110: mol_type = other RNA
  misc_feature 1..110: note = Category: MG3-6/3-4 sgRNA targeting ANGPTL3
  misc_feature 1..110: note = Description: MG3-6/3-4 ANGPTL3 H3
  modified_base 1..3: mod_base = OTHER; note = 2'O-Methyl ribonucleotide
  modified_base 1..3: mod_base = OTHER; note = Phosphorothioate linkage
  modified_base 108..110: mod_base = OTHER; note = 2'O-Methyl ribonucleotide
  modified_base 107..109: mod_base = OTHER; note = Phosphorothioate linkage
actggtttgcagcgatagatcagttgagaatcgaaagattcttaataaggcatccttccgatgctgacttctcaccgtccgttttccaataggagcgggcggtatgtttt

SEQ ID NO: 407 - RNA, 110 nt, synthetic construct
  source 1..110: mol_type = other RNA
  misc_feature 1..110: note = Category: MG3-6/3-4 sgRNA targeting ANGPTL3
  misc_feature 1..110: note = Description: MG3-6/3-4 ANGPTL3 A4
  modified_base 1..3: mod_base = OTHER; note = 2'O-Methyl ribonucleotide
  modified_base 1..3: mod_base = OTHER; note = Phosphorothioate linkage
  modified_base 108..110: mod_base = OTHER; note = 2'O-Methyl ribonucleotide
  modified_base 107..109: mod_base = OTHER; note = Phosphorothioate linkage
cgatagatcataaaaagactgagttgagaatcgaaagattcttaataaggcatccttccgatgctgacttctcaccgtccgttttccaataggagcgggcggtatgtttt

SEQ ID NO: 408 - RNA, 110 nt, synthetic construct
  source 1..110: mol_type = other RNA
  misc_feature 1..110: note = Category: MG3-6/3-4 sgRNA targeting ANGPTL3
  misc_feature 1..110: note = Description: MG3-6/3-4 ANGPTL3 B4
  modified_base 1..3: mod_base = OTHER; note = 2'O-Methyl ribonucleotide
  modified_base 1..3: mod_base = OTHER; note = Phosphorothioate linkage
  modified_base 108..110: mod_base = OTHER; note = 2'O-Methyl ribonucleotide
  modified_base 107..109: mod_base = OTHER; note = Phosphorothioate linkage
cccaactgaaggaggccattgggttgagaatcgaaagattcttaataaggcatccttccgatgctgacttctcaccgtccgttttccaataggagcgggcggtatgtttt

SEQ ID NO: 409 - RNA, 110 nt, synthetic construct
  source 1..110: mol_type = other RNA
  misc_feature 1..110: note = Category: MG3-6/3-4 sgRNA targeting ANGPTL3
  misc_feature 1..110: note = Description: MG3-6/3-4 ANGPTL3 C4
  modified_base 1..3: mod_base = OTHER; note = 2'O-Methyl ribonucleotide
  modified_base 1..3: mod_base = OTHER; note = Phosphorothioate linkage
  modified_base 108..110: mod_base = OTHER; note = 2'O-Methyl ribonucleotide
  modified_base 107..109: mod_base = OTHER; note = Phosphorothioate linkage
ccaactgaaggaggccattggcgttgagaatcgaaagattcttaataaggcatccttccgatgctgacttctcaccgtccgttttccaataggagcgggcggtatgtttt

SEQ ID NO: 410 - RNA, 110 nt, synthetic construct
  source 1..110: mol_type = other RNA
  misc_feature 1..110: note = Category: MG3-6/3-4 sgRNA targeting ANGPTL3
  misc_feature 1..110: note = Description: MG3-6/3-4 ANGPTL3 D4
  modified_base 1..3: mod_base = OTHER; note = 2'O-Methyl ribonucleotide
  modified_base 1..3: mod_base = OTHER; note = Phosphorothioate linkage
  modified_base 108..110: mod_base = OTHER; note = 2'O-Methyl ribonucleotide
  modified_base 107..109: mod_base = OTHER; note = Phosphorothioate linkage
cttgattttggctctggagatagttgagaatcgaaagattcttaataaggcatccttccgatgctgacttctcaccgtccgttttccaataggagcgggcggtatgtttt

SEQ ID NO: 411 - RNA, 110 nt, synthetic construct
  source 1..110: mol_type = other RNA
  misc_feature 1..110: note = Category: MG3-6/3-4 sgRNA targeting ANGPTL3
  misc_feature 1..110: note = Description: MG3-6/3-4 ANGPTL3 E4
  modified_base 1..3: mod_base = OTHER; note = 2'O-Methyl ribonucleotide
  modified_base 1..3: mod_base = OTHER; note = Phosphorothioate linkage
  modified_base 108..110: mod_base = OTHER; note = 2'O-Methyl ribonucleotide
  modified_base 107..109: mod_base = OTHER; note = Phosphorothioate linkage
ttttggctctggagatagagaagttgagaatcgaaagattcttaataaggcatccttccgatgctgacttctcaccgtccgttttccaataggagcgggcggtatgtttt

SEQ ID NO: 412 - RNA, 110 nt, synthetic construct
  source 1..110: mol_type = other RNA
  misc_feature 1..110: note = Category: MG3-6/3-4 sgRNA targeting ANGPTL3
  misc_feature 1..110: note = Description: MG3-6/3-4 ANGPTL3 F4
  modified_base 1..3: mod_base = OTHER; note = 2'O-Methyl ribonucleotide
  modified_base 1..3: mod_base = OTHER; note = Phosphorothioate linkage
  modified_base 108..110: mod_base = OTHER; note = 2'O-Methyl ribonucleotide
  modified_base 107..109: mod_base = OTHER; note = Phosphorothioate linkage
tctggagatagagaatcaaatggttgagaatcgaaagattcttaataaggcatccttccgatgctgacttctcaccgtccgttttccaataggagcgggcggtatgtttt

SEQ ID NO: 413 - RNA, 110 nt, synthetic construct
  source 1..110: mol_type = other RNA
  misc_feature 1..110: note = Category: MG3-6/3-4 sgRNA targeting ANGPTL3
  misc_feature 1..110: note = Description: MG3-6/3-4 ANGPTL3 G4
  modified_base 1..3: mod_base = OTHER; note = 2'O-Methyl ribonucleotide
  modified_base 1..3: mod_base = OTHER; note = Phosphorothioate linkage
  modified_base 108..110: mod_base = OTHER; note = 2'O-Methyl ribonucleotide
  modified_base 107..109: mod_base = OTHER; note = Phosphorothioate linkage
gaattgtcttgatcaattctgggttgagaatcgaaagattcttaataaggcatccttccgatgctgacttctcaccgtccgttttccaataggagcgggcggtatgtttt

SEQ ID NO: 414 - RNA, 110 nt, synthetic construct
  source 1..110: mol_type = other RNA
  misc_feature 1..110: note = Category: MG3-6/3-4 sgRNA targeting ANGPTL3
  misc_feature 1..110: note = Description: MG3-6/3-4 ANGPTL3 H4
  modified_base 1..3: mod_base = OTHER; note = 2'O-Methyl ribonucleotide
  modified_base 1..3: mod_base = OTHER; note = Phosphorothioate linkage
  modified_base 108..110: mod_base = OTHER; note = 2'O-Methyl ribonucleotide
  modified_base 107..109: mod_base = OTHER; note = Phosphorothioate linkage
aattgtcttgatcaattctggagttgagaatcgaaagattcttaataaggcatccttccgatgctgacttctcaccgtccgttttccaataggagcgggcggtatgtttt

SEQ ID NO: 415 - RNA, 110 nt, synthetic construct
  source 1..110: mol_type = other RNA
  misc_feature 1..110: note = Category: MG3-6/3-4 sgRNA targeting ANGPTL3
  misc_feature 1..110: note = Description: MG3-6/3-4 ANGPTL3 A5
  modified_base 1..3: mod_base = OTHER; note = 2'O-Methyl ribonucleotide
  modified_base 1..3: mod_base = OTHER; note = Phosphorothioate linkage
  modified_base 108..110: mod_base = OTHER; note = 2'O-Methyl ribonucleotide
  modified_base 107..109: mod_base = OTHER; note = Phosphorothioate linkage
ggaggaaataactagaggaacagttgagaatcgaaagattcttaataaggcatccttccgatgctgacttctcaccgtccgttttccaataggagcgggcggtatgtttt

SEQ ID NO: 416 - RNA, 110 nt, synthetic construct
  source 1..110: mol_type = other RNA
  misc_feature 1..110: note = Category: MG3-6/3-4 sgRNA targeting ANGPTL3
  misc_feature 1..110: note = Description: MG3-6/3-4 ANGPTL3 B5
  modified_base 1..3: mod_base = OTHER; note = 2'O-Methyl ribonucleotide
  modified_base 1..3: mod_base = OTHER; note = Phosphorothioate linkage
  modified_base 108..110: mod_base = OTHER; note = 2'O-Methyl ribonucleotide
  modified_base 107..109: mod_base = OTHER; note = Phosphorothioate linkage
gaggaaataactagaggaacaagttgagaatcgaaagattcttaataaggcatccttccgatgctgacttctcaccgtccgttttccaataggagcgggcggtatgtttt

SEQ ID NO: 417 - RNA, 110 nt, synthetic construct
  source 1..110: mol_type = other RNA
  misc_feature 1..110: note = Category: MG3-6/3-4 sgRNA targeting ANGPTL3
  misc_feature 1..110: note = Description: MG3-6/3-4 ANGPTL3 C5
  modified_base 1..3: mod_base = OTHER; note = 2'O-Methyl ribonucleotide
  modified_base 1..3: mod_base = OTHER; note = Phosphorothioate linkage
  modified_base 108..110: mod_base = OTHER; note = 2'O-Methyl ribonucleotide
  modified_base 107..109: mod_base = OTHER; note = Phosphorothioate linkage
actctctatatccagacttttggttgagaatcgaaagattcttaataaggcatccttccgatgctgacttctcaccgtccgttttccaataggagcgggcggtatgtttt

SEQ ID NO: 418 - RNA, 110 nt, synthetic construct
  source 1..110: mol_type = other RNA
  misc_feature 1..110: note = Category: MG3-6/3-4 sgRNA targeting ANGPTL3
  misc_feature 1..110: note = Description: MG3-6/3-4 ANGPTL3 D5
  modified_base 1..3: mod_base = OTHER; note = 2'O-Methyl ribonucleotide
  modified_base 1..3: mod_base = OTHER; note = Phosphorothioate linkage
  modified_base 108..110: mod_base = OTHER; note = 2'O-Methyl ribonucleotide
  modified_base 107..109: mod_base = OTHER; note = Phosphorothioate linkage
ctctctatatccagacttttgtgttgagaatcgaaagattcttaataaggcatccttccgatgctgacttctcaccgtccgttttccaataggagcgggcggtatgtttt

SEQ ID NO: 419 - RNA, 110 nt, synthetic construct
  source 1..110: mol_type = other RNA
  misc_feature 1..110: note = Category: MG3-6/3-4 sgRNA targeting ANGPTL3
  misc_feature 1..110: note = Description: MG3-6/3-4 ANGPTL3 E5
  modified_base 1..3: mod_base = OTHER; note = 2'O-Methyl ribonucleotide
  modified_base 1..3: mod_base = OTHER; note = Phosphorothioate linkage
  modified_base 108..110: mod_base = OTHER; note = 2'O-Methyl ribonucleotide
  modified_base 107..109: mod_base = OTHER; note = Phosphorothioate linkage
tctctatatccagacttttgtagttgagaatcgaaagattcttaataaggcatccttccgatgctgacttctcaccgtccgttttccaataggagcgggcggtatgtttt

SEQ ID NO: 420 - RNA, 110 nt, synthetic construct
  source 1..110: mol_type = other RNA
  misc_feature 1..110: note = Category: MG3-6/3-4 sgRNA targeting ANGPTL3
  misc_feature 1..110: note = Description: MG3-6/3-4 ANGPTL3 F5
  modified_base 1..3: mod_base = OTHER; note = 2'O-Methyl ribonucleotide
  modified_base 1..3: mod_base = OTHER; note = Phosphorothioate linkage
  modified_base 108..110: mod_base = OTHER; note = 2'O-Methyl ribonucleotide
  modified_base 107..109: mod_base = OTHER; note = Phosphorothioate linkage
aacaattaaaccaacagcataggttgagaatcgaaagattcttaataaggcatccttccgatgctgacttctcaccgtccgttttccaataggagcgggcggtatgtttt

SEQ ID NO: 421 - RNA, 110 nt, synthetic construct
  source 1..110: mol_type = other RNA
  misc_feature 1..110: note = Category: MG3-6/3-4 sgRNA targeting ANGPTL3
  misc_feature 1..110: note = Description: MG3-6/3-4 ANGPTL3 G5
  modified_base 1..3: mod_base = OTHER; note = 2'O-Methyl ribonucleotide
  modified_base 1..3: mod_base = OTHER; note = Phosphorothioate linkage
  modified_base 108..110: mod_base = OTHER; note = 2'O-Methyl ribonucleotide
  modified_base 107..109: mod_base = OTHER; note = Phosphorothioate linkage
attaaaccaacagcatagtcaagttgagaatcgaaagattcttaataaggcatccttccgatgctgacttctcaccgtccgttttccaataggagcgggcggtatgtttt

SEQ ID NO: 422 - RNA, 110 nt, synthetic construct
  source 1..110: mol_type = other RNA
  misc_feature 1..110: note = Category: MG3-6/3-4 sgRNA targeting ANGPTL3
  misc_feature 1..110: note = Description: MG3-6/3-4 ANGPTL3 H5
  modified_base 1..3: mod_base = OTHER; note = 2'O-Methyl ribonucleotide
  modified_base 1..3: mod_base = OTHER; note = Phosphorothioate linkage
  modified_base 108..110: mod_base = OTHER; note = 2'O-Methyl ribonucleotide
  modified_base 107..109: mod_base = OTHER; note = Phosphorothioate linkage
aaccaacagcatagtcaaataagttgagaatcgaaagattcttaataaggcatccttccgatgctgacttctcaccgtccgttttccaataggagcgggcggtatgtttt

SEQ ID NO: 423 - RNA, 110 nt, synthetic construct
  source 1..110: mol_type = other RNA
  misc_feature 1..110: note = Category: MG3-6/3-4 sgRNA targeting ANGPTL3
  misc_feature 1..110: note = Description: MG3-6/3-4 ANGPTL3 A6
  modified_base 1..3: mod_base = OTHER; note = 2'O-Methyl ribonucleotide
  modified_base 1..3: mod_base = OTHER; note = Phosphorothioate linkage
  modified_base 108..110: mod_base = OTHER; note = 2'O-Methyl ribonucleotide
  modified_base 107..109: mod_base = OTHER; note = Phosphorothioate linkage
accaacagcatagtcaaataaagttgagaatcgaaagattcttaataaggcatccttccgatgctgacttctcaccgtccgttttccaataggagcgggcggtatgtttt

SEQ ID NO: 424 - RNA, 110 nt, synthetic construct
  source 1..110: mol_type = other RNA
  misc_feature 1..110: note = Category: MG3-6/3-4 sgRNA targeting ANGPTL3
  misc_feature 1..110: note = Description: MG3-6/3-4 ANGPTL3 B6
  modified_base 1..3: mod_base = OTHER; note = 2'O-Methyl ribonucleotide
  modified_base 1..3: mod_base = OTHER; note = Phosphorothioate linkage
  modified_base 108..110: mod_base = OTHER; note = 2'O-Methyl ribonucleotide
  modified_base 107..109: mod_base = OTHER; note = Phosphorothioate linkage
gatgctattatcttgtttttctgttgagaatcgaaagattcttaataaggcatccttccgatgctgacttctcaccgtccgttttccaataggagcgggcggtatgtttt

SEQ ID NO: 425 - RNA, 110 nt, synthetic construct
  source 1..110: mol_type = other RNA
  misc_feature 1..110: note = Category: MG3-6/3-4 sgRNA targeting ANGPTL3
  misc_feature 1..110: note = Description: MG3-6/3-4 ANGPTL3 C6
  modified_base 1..3: mod_base = OTHER; note = 2'O-Methyl ribonucleotide
  modified_base 1..3: mod_base = OTHER; note = Phosphorothioate linkage
  modified_base 108..110: mod_base = OTHER; note = 2'O-Methyl ribonucleotide
  modified_base 107..109: mod_base = OTHER; note = Phosphorothioate linkage
aggactagtattcaagaacccagttgagaatcgaaagattcttaataaggcatccttccgatgctgacttctcaccgtccgttttccaataggagcgggcggtatgtttt

SEQ ID NO: 426 - RNA, 110 nt, synthetic construct
  source 1..110: mol_type = other RNA
  misc_feature 1..110: note = Category: MG3-6/3-4 sgRNA targeting ANGPTL3
  misc_feature 1..110: note = Description: MG3-6/3-4 ANGPTL3 D6
  modified_base 1..3: mod_base = OTHER; note = 2'O-Methyl ribonucleotide
  modified_base 1..3: mod_base = OTHER; note = Phosphorothioate linkage
  modified_base 108..110: mod_base = OTHER; note = 2'O-Methyl ribonucleotide
  modified_base 107..109: mod_base = OTHER; note = Phosphorothioate linkage
ggactagtattcaagaacccacgttgagaatcgaaagattcttaataaggcatccttccgatgctgacttctcaccgtccgttttccaataggagcgggcggtatgtttt

SEQ ID NO: 427 - RNA, 110 nt, synthetic construct
  source 1..110: mol_type = other RNA
  misc_feature 1..110: note = Category: MG3-6/3-4 sgRNA targeting ANGPTL3
  misc_feature 1..110: note = Description: MG3-6/3-4 ANGPTL3 E6
  modified_base 1..3: mod_base = OTHER; note = 2'O-Methyl ribonucleotide
  modified_base 1..3: mod_base = OTHER; note = Phosphorothioate linkage
  modified_base 108..110: mod_base = OTHER; note = 2'O-Methyl ribonucleotide
  modified_base 107..109: mod_base = OTHER; note = Phosphorothioate linkage
aagaactactccctttcttcaggttgagaatcgaaagattcttaataaggcatccttccgatgctgacttctcaccgtccgttttccaataggagcgggcggtatgtttt

SEQ ID NO: 428 - RNA, 110 nt, synthetic construct
  source 1..110: mol_type = other RNA
  misc_feature 1..110: note = Category: MG3-6/3-4 sgRNA targeting ANGPTL3
  misc_feature 1..110: note = Description: MG3-6/3-4 ANGPTL3 F6
  modified_base 1..3: mod_base = OTHER; note = 2'O-Methyl ribonucleotide
  modified_base 1..3: mod_base = OTHER; note = Phosphorothioate linkage
  modified_base 108..110: mod_base = OTHER; note = 2'O-Methyl ribonucleotide
  modified_base 107..109: mod_base = OTHER; note = Phosphorothioate linkage
actactccctttcttcagttgagttgagaatcgaaagattcttaataaggcatccttccgatgctgacttctcaccgtccgttttccaataggagcgggcggtatgtttt

SEQ ID NO: 429 - RNA, 110 nt, synthetic construct
  source 1..110: mol_type = other RNA
  misc_feature 1..110: note = Category: MG3-6/3-4 sgRNA targeting ANGPTL3
  misc_feature 1..110: note = Description: MG3-6/3-4 ANGPTL3 G6
  modified_base 1..3: mod_base = OTHER; note = 2'O-Methyl ribonucleotide
  modified_base 1..3: mod_base = OTHER; note = Phosphorothioate linkage
  modified_base 108..110: mod_base = OTHER; note = 2'O-Methyl ribonucleotide
  modified_base 107..109: mod_base = OTHER; note = Phosphorothioate linkage
ctactccctttcttcagttgaagttgagaatcgaaagattcttaataaggcatccttccgatgctgacttctcaccgtccgttttccaataggagcgggcggtatgtttt

SEQ ID NO: 430 - RNA, 110 nt, synthetic construct
  source 1..110: mol_type = other RNA
  misc_feature 1..110: note = Category: MG3-6/3-4 sgRNA targeting ANGPTL3
  misc_feature 1..110: note = Description: MG3-6/3-4 ANGPTL3 H6
  modified_base 1..3: mod_base = OTHER; note = 2'O-Methyl ribonucleotide
  modified_base 1..3: mod_base = OTHER; note = Phosphorothioate linkage
  modified_base 108..110: mod_base = OTHER; note = 2'O-Methyl ribonucleotide
  modified_base 107..109: mod_base = OTHER; note = Phosphorothioate linkage
cctttcttcagttgaatgaaatgttgagaatcgaaagattcttaataaggcatccttccgatgctgacttctcaccgtccgttttccaataggagcgggcggtatgtttt

SEQ ID NO: 431 - RNA, 110 nt, synthetic construct
  source 1..110: mol_type = other RNA
  misc_feature 1..110: note = Category: MG3-6/3-4 sgRNA targeting ANGPTL3
  misc_feature 1..110: note = Description: MG3-6/3-4 ANGPTL3 A7
  modified_base 1..3: mod_base = OTHER; note = 2'O-Methyl ribonucleotide
  modified_base 1..3: mod_base = OTHER; note = Phosphorothioate linkage
  modified_base 108..110: mod_base = OTHER; note = 2'O-Methyl ribonucleotide
  modified_base 107..109: mod_base = OTHER; note = Phosphorothioate linkage
ggtgctcttggcttggaagatagttgagaatcgaaagattcttaataaggcatccttccgatgctgacttctcaccgtccgttttccaataggagcgggcggtatgtttt

SEQ ID NO: 432 - RNA, 110 nt, synthetic construct
  source 1..110: mol_type = other RNA
  misc_feature 1..110: note = Category: MG3-6/3-4 sgRNA targeting ANGPTL3
  misc_feature 1..110: note = Description: MG3-6/3-4 ANGPTL3 B7
  modified_base 1..3: mod_base = OTHER; note = 2'O-Methyl ribonucleotide
  modified_base 1..3: mod_base = OTHER; note = Phosphorothioate linkage
  modified_base 108..110: mod_base = OTHER; note = 2'O-Methyl ribonucleotide
  modified_base 107..109: mod_base = OTHER; note = Phosphorothioate linkage
gtgctcttggcttggaagataggttgagaatcgaaagattcttaataaggcatccttccgatgctgacttctcaccgtccgttttccaataggagcgggcggtatgtttt

SEQ ID NO: 433 - RNA, 110 nt, synthetic construct
  source 1..110: mol_type = other RNA
  misc_feature 1..110: note = Category: MG3-6/3-4 sgRNA targeting ANGPTL3
  misc_feature 1..110: note = Description: MG3-6/3-4 ANGPTL3 C7
  modified_base 1..3: mod_base = OTHER; note = 2'O-Methyl ribonucleotide
  modified_base 1..3: mod_base = OTHER; note = Phosphorothioate linkage
  modified_base 108..110: mod_base = OTHER; note = 2'O-Methyl ribonucleotide
  modified_base 107..109: mod_base = OTHER; note = Phosphorothioate linkage
atagagaaatttctgtgggttcgttgagaatcgaaagattcttaataaggcatccttccgatgctgacttctcaccgtccgttttccaataggagcgggcggtatgtttt

SEQ ID NO: 434 - RNA, 110 nt, synthetic construct
  source 1..110: mol_type = other RNA
  misc_feature 1..110: note = Category: MG3-6/3-4 sgRNA targeting ANGPTL3
  misc_feature 1..110: note = Description: MG3-6/3-4 ANGPTL3 D7
  modified_base 1..3: mod_base = OTHER; note = 2'O-Methyl ribonucleotide
  modified_base 1..3: mod_base = OTHER; note = Phosphorothioate linkage
  modified_base 108..110: mod_base = OTHER; note = 2'O-Methyl ribonucleotide
  modified_base 107..109: mod_base = OTHER; note = Phosphorothioate linkage
gaatactagtccttctgagctggttgagaatcgaaagattcttaataaggcatccttccgatgctgacttctcaccgtccgttttccaataggagcgggcggtatgtttt

SEQ ID NO: 435 - RNA, 110 nt, synthetic construct
  source 1..110: mol_type = other RNA
  misc_feature 1..110: note = Category: MG3-6/3-4 sgRNA targeting ANGPTL3
  misc_feature 1..110: note = Description: MG3-6/3-4 ANGPTL3 E7
  modified_base 1..3: mod_base = OTHER; note = 2'O-Methyl ribonucleotide
  modified_base 1..3: mod_base = OTHER; note = Phosphorothioate linkage
  modified_base 108..110: mod_base = OTHER; note = 2'O-Methyl ribonucleotide
  modified_base 107..109: mod_base = OTHER; note = Phosphorothioate linkage
ttattgattctaggcattcctggttgagaatcgaaagattcttaataaggcatccttccgatgctgacttctcaccgtccgttttccaataggagcgggcggtatgtttt

SEQ ID NO: 436 - RNA, 110 nt, synthetic construct
  source 1..110: mol_type = other RNA
  misc_feature 1..110: note = Category: MG3-6/3-4 sgRNA targeting ANGPTL3
  misc_feature 1..110: note = Description: MG3-6/3-4 ANGPTL3 F7
  modified_base 1..3: mod_base = OTHER; note = 2'O-Methyl ribonucleotide
  modified_base 1..3: mod_base = OTHER; note = Phosphorothioate linkage
  modified_base 108..110: mod_base = OTHER; note = 2'O-Methyl ribonucleotide
  modified_base 107..109: mod_base = OTHER; note = Phosphorothioate linkage
gtctactgtgatgttatatcaggttgagaatcgaaagattcttaataaggcatccttccgatgctgacttctcaccgtccgttttccaataggagcgggcggtatgtttt

SEQ ID NO: 437 - RNA, 110 nt, synthetic construct
  source 1..110: mol_type = other RNA
  misc_feature 1..110: note = Category: MG3-6/3-4 sgRNA targeting ANGPTL3
  misc_feature 1..110: note = Description: MG3-6/3-4 ANGPTL3 H7
  misc_feature 1..110: note = Category: MG3-6/3-4 sgRNA targeting ANGPTL3
  misc_feature 1..110: note = Description: MG3-6/3-4 ANGPTL3 G7
  modified_base 1..3: mod_base = OTHER; note = 2'O-Methyl ribonucleotide
  modified_base 1..3: mod_base = OTHER; note = Phosphorothioate linkage
  modified_base 108..110: mod_base = OTHER; note = 2'O-Methyl ribonucleotide
  modified_base 107..109: mod_base = OTHER; note = Phosphorothioate linkage
ctgatataacatcacagtagacgttgagaatcgaaagattcttaataaggcatccttccgatgctgacttctcaccgtccgttttccaataggagcgggcggtatgtttt

SEQ ID NO: 438 - RNA, 110 nt, synthetic construct
  source 1..110: mol_type = other RNA
  misc_feature 1..110: note = Category: MG3-6/3-4 sgRNA targeting ANGPTL3
  misc_feature 1..110: note = Description: MG3-6/3-4 ANGPTL3 H7
  modified_base 1..3: mod_base = OTHER; note = 2'O-Methyl ribonucleotide
  modified_base 1..3: mod_base = OTHER; note = Phosphorothioate linkage
  modified_base 108..110: mod_base = OTHER; note = 2'O-Methyl ribonucleotide
  modified_base 107..109: mod_base = OTHER; note = Phosphorothioate linkage
tgatataacatcacagtagacagttgagaatcgaaagattcttaataaggcatccttccgatgctgacttctcaccgtccgttttccaataggagcgggcggtatgtttt

SEQ ID NO: 439 - RNA, 110 nt, synthetic construct
  source 1..110: mol_type = other RNA
  misc_feature 1..110: note = Category: MG3-6/3-4 sgRNA targeting ANGPTL3
  misc_feature 1..110: note = Description: MG3-6/3-4 ANGPTL3 A8
  modified_base 1..3: mod_base = OTHER; note = 2'O-Methyl ribonucleotide
  modified_base 1..3: mod_base = OTHER; note = Phosphorothioate linkage
  modified_base 108..110: mod_base = OTHER; note = 2'O-Methyl ribonucleotide
  modified_base 107..109: mod_base = OTHER; note = Phosphorothioate linkage
gatataacatcacagtagacatgttgagaatcgaaagattcttaataaggcatccttccgatgctgacttctcaccgtccgttttccaataggagcgggcggtatgtttt

SEQ ID NO: 440 - RNA, 110 nt, synthetic construct
  source 1..110: mol_type = other RNA
  misc_feature 1..110: note = Category: MG3-6/3-4 sgRNA targeting ANGPTL3
  misc_feature 1..110: note = Description: MG3-6/3-4 ANGPTL3 B8
  modified_base 1..3: mod_base = OTHER; note = 2'O-Methyl ribonucleotide
  modified_base 1..3: mod_base = OTHER; note = Phosphorothioate linkage
  modified_base 108..110: mod_base = OTHER; note = 2'O-Methyl ribonucleotide
  modified_base 107..109: mod_base = OTHER; note = Phosphorothioate linkage
cacttgtatgttcacctctgttgttgagaatcgaaagattcttaataaggcatccttccgatgctgacttctcaccgtccgttttccaataggagcgggcggtatgtttt

SEQ ID NO: 441 - RNA, 110 nt, synthetic construct
  source 1..110: mol_type = other RNA
  misc_feature 1..110: note = Category: MG3-6/3-4 sgRNA targeting ANGPTL3
  misc_feature 1..110: note = Description: MG3-6/3-4 ANGPTL3 C8
  modified_base 1..3: mod_base = OTHER; note = 2'O-Methyl ribonucleotide
  modified_base 1..3: mod_base = OTHER; note = Phosphorothioate linkage
  modified_base 108..110: mod_base = OTHER; note = 2'O-Methyl ribonucleotide
  modified_base 107..109: mod_base = OTHER; note = Phosphorothioate linkage
tataaatggtggtacattcagcgttgagaatcgaaagattcttaataaggcatccttccgatgctgacttctcaccgtccgttttccaataggagcgggcggtatgtttt

SEQ ID NO: 442 - RNA, 110 nt, synthetic construct
  source 1..110: mol_type = other RNA
  misc_feature 1..110: note = Category: MG3-6/3-4 sgRNA targeting ANGPTL3
  misc_feature 1..110: note = Description: MG3-6/3-4 ANGPTL3 D8
  modified_base 1..3: mod_base = OTHER; note = 2'O-Methyl ribonucleotide
  modified_base 1..3: mod_base = OTHER; note = Phosphorothioate linkage
  modified_base 108..110: mod_base = OTHER; note = 2'O-Methyl ribonucleotide
  modified_base 107..109: mod_base = OTHER; note = Phosphorothioate linkage
tggtacattcagcaggaatgccgttgagaatcgaaagattcttaataaggcatccttccgatgctgacttctcaccgtccgttttccaataggagcgggcggtatgtttt

SEQ ID NO: 443 - RNA, 110 nt, synthetic construct
  source 1..110: mol_type = other RNA
  misc_feature 1..110: note = Category: MG3-6/3-4 sgRNA targeting ANGPTL3
  misc_feature 1..110: note = Description: MG3-6/3-4 ANGPTL3 E8
  modified_base 1..3: mod_base = OTHER; note = 2'O-Methyl ribonucleotide
  modified_base 1..3: mod_base = OTHER; note = Phosphorothioate linkage
  modified_base 108..110: mod_base = OTHER; note = 2'O-Methyl ribonucleotide
  modified_base 107..109: mod_base = OTHER; note = Phosphorothioate linkage
gtccatggacattaattcaacagttgagaatcgaaagattcttaataaggcatccttccgatgctgacttctcaccgtccgttttccaataggagcgggcggtatgtttt

SEQ ID NO: 444 - RNA, 110 nt, synthetic construct
  source 1..110: mol_type = other RNA
  misc_feature 1..110: note = Category: MG3-6/3-4 sgRNA targeting ANGPTL3
  misc_feature 1..110: note = Description: MG3-6/3-4 ANGPTL3 F8
  modified_base 1..3: mod_base = OTHER; note = 2'O-Methyl ribonucleotide
  modified_base 1..3: mod_base = OTHER; note = Phosphorothioate linkage
  modified_base 108..110: mod_base = OTHER; note = 2'O-Methyl ribonucleotide
  modified_base 107..109: mod_base = OTHER; note = Phosphorothioate linkage
ttcaacatcgaatagatggatcgttgagaatcgaaagattcttaataaggcatccttccgatgctgacttctcaccgtccgttttccaataggagcgggcggtatgtttt

SEQ ID NO: 445 - RNA, 110 nt, synthetic construct
  source 1..110: mol_type = other RNA
  misc_feature 1..110: note = Category: MG3-6/3-4 sgRNA targeting ANGPTL3
  misc_feature 1..110: note = Description: MG3-6/3-4 ANGPTL3 G8
  modified_base 1..3: mod_base = OTHER; note = 2'O-Methyl ribonucleotide
  modified_base 1..3: mod_base = OTHER; note = Phosphorothioate linkage
  modified_base 108..110: mod_base = OTHER; note = 2'O-Methyl ribonucleotide
  modified_base 107..109: mod_base = OTHER; note = Phosphorothioate linkage
atagatggatcacaaaacttcagttgagaatcgaaagattcttaataaggcatccttccgatgctgacttctcaccgtccgttttccaataggagcgggcggtatgtttt

SEQ ID NO: 446 - RNA, 110 nt, synthetic construct
  source 1..110: mol_type = other RNA
  misc_feature 1..110: note = Category: MG3-6/3-4 sgRNA targeting ANGPTL3
  misc_feature 1..110: note = Description: MG3-6/3-4 ANGPTL3 H8
  modified_base 1..3: mod_base = OTHER; note = 2'O-Methyl ribonucleotide
  modified_base 1..3: mod_base = OTHER; note = Phosphorothioate linkage
  modified_base 108..110: mod_base = OTHER; note = 2'O-Methyl ribonucleotide
  modified_base 107..109: mod_base = OTHER; note = Phosphorothioate linkage
ttcaatgaaacgtgggagaactgttgagaatcgaaagattcttaataaggcatccttccgatgctgacttctcaccgtccgttttccaataggagcgggcggtatgtttt

SEQ ID NO: 447 - RNA, 110 nt, synthetic construct
  source 1..110: mol_type = other RNA
  misc_feature 1..110: note = Category: MG3-6/3-4 sgRNA targeting ANGPTL3
  misc_feature 1..110: note = Description: MG3-6/3-4 ANGPTL3 A9
  modified_base 1..3: mod_base = OTHER; note = 2'O-Methyl ribonucleotide
  modified_base 1..3: mod_base = OTHER; note = Phosphorothioate linkage
  modified_base 108..110: mod_base = OTHER; note = 2'O-Methyl ribonucleotide
  modified_base 107..109: mod_base = OTHER; note = Phosphorothioate linkage
agtccccttaccatcaagcctcgttgagaatcgaaagattcttaataaggcatccttccgatgctgacttctcaccgtccgttttccaataggagcgggcggtatgtttt

SEQ ID NO: 448 - RNA, 110 nt, synthetic construct
  source 1..110: mol_type = other RNA
  misc_feature 1..110: note = Category: MG3-6/3-4 sgRNA targeting ANGPTL3
  misc_feature 1..110: note = Description: MG3-6/3-4 ANGPTL3 B9
  modified_base 1..3: mod_base = OTHER; note = 2'O-Methyl ribonucleotide
  modified_base 1..3: mod_base = OTHER; note = Phosphorothioate linkage
  modified_base 108..110: mod_base = OTHER; note = 2'O-Methyl ribonucleotide
  modified_base 107..109: mod_base = OTHER; note = Phosphorothioate linkage
tttgtgatccatctattcgatggttgagaatcgaaagattcttaataaggcatccttccgatgctgacttctcaccgtccgttttccaataggagcgggcggtatgtttt

SEQ ID NO: 449 - RNA, 110 nt, synthetic construct
  source 1..110: mol_type = other RNA
  misc_feature 1..110: note = Category: MG3-6/3-4 sgRNA targeting ANGPTL3
  misc_feature 1..110: note = Description: MG3-6/3-4 ANGPTL3 C9
  modified_base 1..3: mod_base = OTHER; note = 2'O-Methyl ribonucleotide
  modified_base 1..3: mod_base = OTHER; note = Phosphorothioate linkage
  modified_base 108..110: mod_base = OTHER; note = 2'O-Methyl ribonucleotide
  modified_base 107..109: mod_base = OTHER; note = Phosphorothioate linkage
tgaattaatgtccatggactacgttgagaatcgaaagattcttaataaggcatccttccgatgctgacttctcaccgtccgttttccaataggagcgggcggtatgtttt

SEQ ID NO: 450 - RNA, 110 nt, synthetic construct
  source 1..110: mol_type = other RNA
  misc_feature 1..110: note = Category: MG3-6/3-4 sgRNA targeting ANGPTL3
  misc_feature 1..110: note = Description: MG3-6/3-4 ANGPTL3 D9
  modified_base 1..3: mod_base = OTHER; note = 2'O-Methyl ribonucleotide
  modified_base 1..3: mod_base = OTHER; note = Phosphorothioate linkage
  modified_base 108..110: mod_base = OTHER; note = 2'O-Methyl ribonucleotide
  modified_base 107..109: mod_base = OTHER; note = Phosphorothioate linkage
tttacgaattgagttggaagacgttgagaatcgaaagattcttaataaggcatccttccgatgctgacttctcaccgtccgttttccaataggagcgggcggtatgtttt

SEQ ID NO: 451 - RNA, 110 nt, synthetic construct
  source 1..110: mol_type = other RNA
  misc_feature 1..110: note = Category: MG3-6/3-4 sgRNA targeting ANGPTL3
  misc_feature 1..110: note = Description: MG3-6/3-4 ANGPTL3 E9
  modified_base 1..3: mod_base = OTHER; note = 2'O-Methyl ribonucleotide
  modified_base 1..3: mod_base = OTHER; note = Phosphorothioate linkage
  modified_base 108..110: mod_base = OTHER; note = 2'O-Methyl ribonucleotide
  modified_base 107..109: mod_base = OTHER; note = Phosphorothioate linkage
ggcaatgtccccaatgcaatccgttgagaatcgaaagattcttaataaggcatccttccgatgctgacttctcaccgtccgttttccaataggagcgggcggtatgtttt

SEQ ID NO: 452 - RNA, 110 nt, synthetic construct
  source 1..110: mol_type = other RNA
  misc_feature 1..110: note = Category: MG3-6/3-4 sgRNA targeting ANGPTL3
  misc_feature 1..110: note = Description: MG3-6/3-4 ANGPTL3 F9
  modified_base 1..3: mod_base = OTHER; note = 2'O-Methyl ribonucleotide
  modified_base 1..3: mod_base = OTHER; note = Phosphorothioate linkage
  modified_base 108..110: mod_base = OTHER; note = 2'O-Methyl ribonucleotide
  modified_base 107..109: mod_base = OTHER; note = Phosphorothioate linkage
gcaatgtccccaatgcaatcccgttgagaatcgaaagattcttaataaggcatccttccgatgctgacttctcaccgtccgttttccaataggagcgggcggtatgtttt

SEQ ID NO: 453 - RNA, 110 nt, synthetic construct
  source 1..110: mol_type = other RNA
  misc_feature 1..110: note = Category: MG3-6/3-4 sgRNA targeting ANGPTL3
  misc_feature 1..110: note = Description: MG3-6/3-4 ANGPTL3 G9
  modified_base 1..3: mod_base = OTHER; note = 2'O-Methyl ribonucleotide
  modified_base 1..3: mod_base = OTHER; note = Phosphorothioate linkage
  modified_base 108..110: mod_base = OTHER; note = 2'O-Methyl ribonucleotide
  modified_base 107..109: mod_base = OTHER; note = Phosphorothioate linkage
gttttctacttgggatcacaaagttgagaatcgaaagattcttaataaggcatccttccgatgctgacttctcaccgtccgttttccaataggagcgggcggtatgtttt

SEQ ID NO: 454 - RNA, 110 nt, synthetic construct
  source 1..110: mol_type = other RNA
  misc_feature 1..110: note = Category: MG3-6/3-4 sgRNA targeting ANGPTL3
  misc_feature 1..110: note = Description: MG3-6/3-4 ANGPTL3 H9
  modified_base 1..3: mod_base = OTHER; note = 2'O-Methyl ribonucleotide
  modified_base 1..3: mod_base = OTHER; note = Phosphorothioate linkage
  modified_base 108..110: mod_base = OTHER; note = 2'O-Methyl ribonucleotide
  modified_base 107..109: mod_base = OTHER; note = Phosphorothioate linkage
ccttttgctttgtgatcccaaggttgagaatcgaaagattcttaataaggcatccttccgatgctgacttctcaccgtccgttttccaataggagcgggcggtatgtttt

SEQ ID NO: 455 - RNA, 110 nt, synthetic construct
  source 1..110: mol_type = other RNA
  misc_feature 1..110: note = Category: MG3-6/3-4 sgRNA targeting ANGPTL3
  misc_feature 1..110: note = Description: MG3-6/3-4 ANGPTL3 A10
  modified_base 1..3: mod_base = OTHER; note = 2'O-Methyl ribonucleotide
  modified_base 1..3: mod_base = OTHER; note = Phosphorothioate linkage
  modified_base 108..110: mod_base = OTHER; note = 2'O-Methyl ribonucleotide
  modified_base 107..109: mod_base = OTHER; note = Phosphorothioate linkage
cttttgctttgtgatcccaagtgttgagaatcgaaagattcttaataaggcatccttccgatgctgacttctcaccgtccgttttccaataggagcgggcggtatgtttt

SEQ ID NO: 456 - RNA, 110 nt, synthetic construct
  source 1..110: mol_type = other RNA
  misc_feature 1..110: note = Category: MG3-6/3-4 sgRNA targeting ANGPTL3
  misc_feature 1..110: note = Description: MG3-6/3-4 ANGPTL3 B10
  modified_base 1..3: mod_base = OTHER; note = 2'O-Methyl ribonucleotide
  modified_base 1..3: mod_base = OTHER; note = Phosphorothioate linkage
  modified_base 108..110: mod_base = OTHER; note = 2'O-Methyl ribonucleotide
  modified_base 107..109: mod_base = OTHER; note = Phosphorothioate linkage
ttgtgatcccaagtagaaaacagttgagaatcgaaagattcttaataaggcatccttccgatgctgacttctcaccgtccgttttccaataggagcgggcggtatgtttt

SEQ ID NO: 457 - RNA, 110 nt, synthetic construct
  source 1..110: mol_type = other RNA
  misc_feature 1..110: note = Category: MG3-6/3-4 sgRNA targeting ANGPTL3
  misc_feature 1..110: note = Description: MG3-6/3-4 ANGPTL3 C10
  modified_base 1..3: mod_base = OTHER; note = 2'O-Methyl ribonucleotide
  modified_base 1..3: mod_base = OTHER; note = Phosphorothioate linkage
  modified_base 108..110: mod_base = OTHER; note = 2'O-Methyl ribonucleotide
  modified_base 107..109: mod_base = OTHER; note = Phosphorothioate linkage
agttggtttcgtgatttcccaagttgagaatcgaaagattcttaataaggcatccttccgatgctgacttctcaccgtccgttttccaataggagcgggcggtatgtttt

SEQ ID NO: 458 - RNA, 110 nt, synthetic construct
  source 1..110: mol_type = other RNA
  misc_feature 1..110: note = Category: MG3-6/3-4 sgRNA targeting ANGPTL3
  misc_feature 1..110: note = Description: MG3-6/3-4 ANGPTL3 D10
  modified_base 1..3: mod_base = OTHER; note = 2'O-Methyl ribonucleotide
  modified_base 1..3: mod_base = OTHER; note = Phosphorothioate linkage
  modified_base 108..110: mod_base = OTHER; note = 2'O-Methyl ribonucleotide
  modified_base 107..109: mod_base = OTHER; note = Phosphorothioate linkage
gttggtttcgtgatttcccaaggttgagaatcgaaagattcttaataaggcatccttccgatgctgacttctcaccgtccgttttccaataggagcgggcggtatgtttt

SEQ ID NO: 459 - RNA, 110 nt, synthetic construct
  source 1..110: mol_type = other RNA
  misc_feature 1..110: note = Category: MG3-6/3-4 sgRNA targeting ANGPTL3
  misc_feature 1..110: note = Description: MG3-6/3-4 ANGPTL3 E10
  modified_base 1..3: mod_base = OTHER; note = 2'O-Methyl ribonucleotide
  modified_base 1..3: mod_base = OTHER; note = Phosphorothioate linkage
  modified_base 108..110: mod_base = OTHER; note = 2'O-Methyl ribonucleotide
  modified_base 107..109: mod_base = OTHER; note = Phosphorothioate linkage
gtttcgtgatttcccaagtaaagttgagaatcgaaagattcttaataaggcatccttccgatgctgacttctcaccgtccgttttccaataggagcgggcggtatgtttt

SEQ ID NO: 460 - RNA, 110 nt, synthetic construct
  source 1..110: mol_type = other RNA
  misc_feature 1..110: note = Category: MG3-6/3-4 sgRNA targeting ANGPTL3
  misc_feature 1..110: note = Description: MG3-6/3-4 ANGPTL3 F10
  modified_base 1..3: mod_base = OTHER; note = 2'O-Methyl ribonucleotide
  modified_base 1..3: mod_base = OTHER; note = Phosphorothioate linkage
  modified_base 108..110: mod_base = OTHER; note = 2'O-Methyl ribonucleotide
  modified_base 107..109: mod_base = OTHER; note = Phosphorothioate linkage
ttccagtcttccaactcaattcgttgagaatcgaaagattcttaataaggcatccttccgatgctgacttctcaccgtccgttttccaataggagcgggcggtatgtttt

SEQ ID NO: 461 - RNA, 110 nt, synthetic construct
  source 1..110: mol_type = other RNA
  misc_feature 1..110: note = Category: MG3-6/3-4 sgRNA targeting ANGPTL3
  misc_feature 1..110: note = Description: MG3-6/3-4 ANGPTL3 G10
  modified_base 1..3: mod_base = OTHER; note = 2'O-Methyl ribonucleotide
  modified_base 1..3: mod_base = OTHER; note = Phosphorothioate linkage
  modified_base 108..110: mod_base = OTHER; note = 2'O-Methyl ribonucleotide
  modified_base 107..109: mod_base = OTHER; note = Phosphorothioate linkage
agtatatcttctctaggcccaagttgagaatcgaaagattcttaataaggcatccttccgatgctgacttctcaccgtccgttttccaataggagcgggcggtatgtttt

SEQ ID NO: 462 - RNA, 110 nt, synthetic construct
  source 1..110: mol_type = other RNA
  misc_feature 1..110: note = Category: MG3-6/3-4 sgRNA targeting ANGPTL3
  misc_feature 1..110: note = Description: MG3-6/3-4 ANGPTL3 H10
  modified_base 1..3: mod_base = OTHER; note = 2'O-Methyl ribonucleotide
  modified_base 1..3: mod_base = OTHER; note = Phosphorothioate linkage
  modified_base 108..110: mod_base = OTHER; note = 2'O-Methyl ribonucleotide
  modified_base 107..109: mod_base = OTHER; note = Phosphorothioate linkage
gtatatcttctctaggcccaacgttgagaatcgaaagattcttaataaggcatccttccgatgctgacttctcaccgtccgttttccaataggagcgggcggtatgtttt

SEQ ID NO: 463 - RNA, 110 nt, synthetic construct
  source 1..110: mol_type = other RNA
  misc_feature 1..110: note = Category: MG3-6/3-4 sgRNA targeting ANGPTL3
  misc_feature 1..110: note = Description: MG3-6/3-4 ANGPTL3 A11
  modified_base 1..3: mod_base = OTHER; note = 2'O-Methyl ribonucleotide
  modified_base 1..3: mod_base = OTHER; note = Phosphorothioate linkage
  modified_base 108..110: mod_base = OTHER; note = 2'O-Methyl ribonucleotide
  modified_base 107..109: mod_base = OTHER; note = Phosphorothioate linkage
tctaggcccaaccaaaattctcgttgagaatcgaaagattcttaataaggcatccttccgatgctgacttctcaccgtccgttttccaataggagcgggcggtatgtttt

SEQ ID NO: 464 - RNA, 110 nt, synthetic construct
  source 1..110: mol_type = other RNA
  misc_feature 1..110: note = Category: MG3-6/3-4 sgRNA targeting ANGPTL3
  misc_feature 1..110: note = Description: MG3-6/3-4 ANGPTL3 B11
  modified_base 1..3: mod_base = OTHER; note = 2'O-Methyl ribonucleotide
  modified_base 1..3: mod_base = OTHER; note = Phosphorothioate linkage
  modified_base 108..110: mod_base = OTHER; note = 2'O-Methyl ribonucleotide
  modified_base 107..109: mod_base = OTHER; note = Phosphorothioate linkage
ctaggcccaaccaaaattctccgttgagaatcgaaagattcttaataaggcatccttccgatgctgacttctcaccgtccgttttccaataggagcgggcggtatgtttt

SEQ ID NO: 465 - RNA, 110 nt, synthetic construct
  source 1..110: mol_type = other RNA
  misc_feature 1..110: note = Category: MG3-6/3-4 sgRNA targeting ANGPTL3
  misc_feature 1..110: note = Description: MG3-6/3-4 ANGPTL3 C11
  modified_base 1..3: mod_base = OTHER; note = 2'O-Methyl ribonucleotide
  modified_base 1..3: mod_base = OTHER; note = Phosphorothioate linkage
  modified_base 108..110: mod_base = OTHER; note = 2'O-Methyl ribonucleotide
  modified_base 107..109: mod_base = OTHER; note = Phosphorothioate linkage
gcccaaccaaaattctcctgaagttgagaatcgaaagattcttaataaggcatccttccgatgctgacttctcaccgtccgttttccaataggagcgggcggtatgtttt

SEQ ID NO: 466 - RNA, 110 nt, synthetic construct
  source 1..110: mol_type = other RNA
  misc_feature 1..110: note = Category: MG3-6/3-4 sgRNA targeting ANGPTL3
  misc_feature 1..110: note = Description: MG3-6/3-4 ANGPTL3 D11
  modified_base 1..3: mod_base = OTHER; note = 2'O-Methyl ribonucleotide
  modified_base 1..3: mod_base = OTHER; note = Phosphorothioate linkage
  modified_base 108..110: mod_base = OTHER; note = 2'O-Methyl ribonucleotide
  modified_base 107..109: mod_base = OTHER; note = Phosphorothioate linkage
tggtggtggcatgatgagtgtggttgagaatcgaaagattcttaataaggcatccttccgatgctgacttctcaccgtccgttttccaataggagcgggcggtatgtttt

SEQ ID NO: 467 - RNA, 110 nt, synthetic construct
  source 1..110: mol_type = other RNA
  misc_feature 1..110: note = Category: MG3-6/3-4 sgRNA targeting ANGPTL3
  misc_feature 1..110: note = Description: MG3-6/3-4 ANGPTL3 E11
  modified_base 1..3: mod_base = OTHER; note = 2'O-Methyl ribonucleotide
  modified_base 1..3: mod_base = OTHER; note = Phosphorothioate linkage
  modified_base 108..110: mod_base = OTHER; note = 2'O-Methyl ribonucleotide
  modified_base 107..109: mod_base = OTHER; note = Phosphorothioate linkage
ggtggtggcatgatgagtgtgggttgagaatcgaaagattcttaataaggcatccttccgatgctgacttctcaccgtccgttttccaataggagcgggcggtatgtttt

SEQ ID NO: 468 - RNA, 110 nt, synthetic construct
  source 1..110: mol_type = other RNA
  misc_feature 1..110: note = Category: MG3-6/3-4 sgRNA targeting ANGPTL3
  misc_feature 1..110: note = Description: MG3-6/3-4 ANGPTL3 F11
  modified_base 1..3: mod_base = OTHER; note = 2'O-Methyl ribonucleotide
  modified_base 1..3: mod_base = OTHER; note = Phosphorothioate linkage
  modified_base 108..110: mod_base = OTHER; note = 2'O-Methyl ribonucleotide
  modified_base 107..109: mod_base = OTHER; note = Phosphorothioate linkage
tgatgagtgtggagaaaacaacgttgagaatcgaaagattcttaataaggcatccttccgatgctgacttctcaccgtccgttttccaataggagcgggcggtatgtttt

SEQ ID NO: 469 - RNA, 110 nt, synthetic construct
  source 1..110: mol_type = other RNA
  misc_feature 1..110: note = Category: MG3-6/3-4 sgRNA targeting ANGPTL3
  misc_feature 1..110: note = Description: MG3-6/3-4 ANGPTL3 G11
  modified_base 1..3: mod_base = OTHER; note = 2'O-Methyl ribonucleotide
  modified_base 1..3: mod_base = OTHER; note = Phosphorothioate linkage
  modified_base 108..110: mod_base = OTHER; note = 2'O-Methyl ribonucleotide
  modified_base 107..109: mod_base = OTHER; note = Phosphorothioate linkage
tgtggagaaaacaacctaaatggttgagaatcgaaagattcttaataaggcatccttccgatgctgacttctcaccgtccgttttccaataggagcgggcggtatgtttt

SEQ ID NO: 470 - RNA, 110 nt, synthetic construct
  source 1..110: mol_type = other RNA
  misc_feature 1..110: note = Category: MG3-6/3-4 sgRNA targeting ANGPTL3
  misc_feature 1..110: note = Description: MG3-6/3-4 ANGPTL3 H11
  modified_base 1..3: mod_base = OTHER; note = 2'O-Methyl ribonucleotide
  modified_base 1..3: mod_base = OTHER; note = Phosphorothioate linkage
  modified_base 108..110: mod_base = OTHER; note = 2'O-Methyl ribonucleotide
  modified_base 107..109: mod_base = OTHER; note = Phosphorothioate linkage
ggtaaatataacaaaccaagaggttgagaatcgaaagattcttaataaggcatccttccgatgctgacttctcaccgtccgttttccaataggagcgggcggtatgtttt

SEQ ID NO: 471 - RNA, 110 nt, synthetic construct
  source 1..110: mol_type = other RNA
  misc_feature 1..110: note = Category: MG3-6/3-4 sgRNA targeting ANGPTL3
  misc_feature 1..110: note = Description: MG3-6/3-4 ANGPTL3 A12
  modified_base 1..3: mod_base = OTHER; note = 2'O-Methyl ribonucleotide
  modified_base 1..3: mod_base = OTHER; note = Phosphorothioate linkage
  modified_base 108..110: mod_base = OTHER; note = 2'O-Methyl ribonucleotide
  modified_base 107..109: mod_base = OTHER; note = Phosphorothioate linkage
gaagaggattatcttggaagtcgttgagaatcgaaagattcttaataaggcatccttccgatgctgacttctcaccgtccgttttccaataggagcgggcggtatgtttt

SEQ ID NO: 472 - RNA, 110 nt, synthetic construct
  source 1..110: mol_type = other RNA
  misc_feature 1..110: note = Category: MG3-6/3-4 sgRNA targeting ANGPTL3
  misc_feature 1..110: note = Description: MG3-6/3-4 ANGPTL3 B12
  modified_base 1..3: mod_base = OTHER; note = 2'O-Methyl ribonucleotide
  modified_base 1..3: mod_base = OTHER; note = Phosphorothioate linkage
  modified_base 108..110: mod_base = OTHER; note = 2'O-Methyl ribonucleotide
  modified_base 107..109: mod_base = OTHER; note = Phosphorothioate linkage
aagaggattatcttggaagtctgttgagaatcgaaagattcttaataaggcatccttccgatgctgacttctcaccgtccgttttccaataggagcgggcggtatgtttt

SEQ ID NO: 473 - RNA, 110 nt, synthetic construct
  source 1..110: mol_type = other RNA
  misc_feature 1..110: note = Category: MG3-6/3-4 sgRNA targeting ANGPTL3
  misc_feature 1..110: note = Description: MG3-6/3-4 ANGPTL3 C12
  modified_base 1..3: mod_base = OTHER; note = 2'O-Methyl ribonucleotide
  modified_base 1..3: mod_base = OTHER; note = Phosphorothioate linkage
  modified_base 108..110: mod_base = OTHER; note = 2'O-Methyl ribonucleotide
  modified_base 107..109: mod_base = OTHER; note = Phosphorothioate linkage
tcaaaatggaaggttatactctgttgagaatcgaaagattcttaataaggcatccttccgatgctgacttctcaccgtccgttttccaataggagcgggcggtatgtttt

SEQ ID NO: 474 - RNA, 110 nt, synthetic construct
  source 1..110: mol_type = other RNA
  misc_feature 1..110: note = Category: MG3-6/3-4 sgRNA targeting ANGPTL3
  misc_feature 1..110: note = Description: MG3-6/3-4 ANGPTL3 D12
  modified_base 1..3: mod_base = OTHER; note = 2'O-Methyl ribonucleotide
  modified_base 1..3: mod_base = OTHER; note = Phosphorothioate linkage
  modified_base 108..110: mod_base = OTHER; note = 2'O-Methyl ribonucleotide
  modified_base 107..109: mod_base = OTHER; note = Phosphorothioate linkage
caaaatggaaggttatactctagttgagaatcgaaagattcttaataaggcatccttccgatgctgacttctcaccgtccgttttccaataggagcgggcggtatgtttt

SEQ ID NO: 475 - RNA, 110 nt, synthetic construct
  source 1..110: mol_type = other RNA
  misc_feature 1..110: note = Category: MG3-6/3-4 sgRNA targeting ANGPTL3
  misc_feature 1..110: note = Description: MG3-6/3-4 ANGPTL3 E12
  modified_base 1..3: mod_base = OTHER; note = 2'O-Methyl ribonucleotide
  modified_base 1..3: mod_base = OTHER; note = Phosphorothioate linkage
  modified_base 108..110: mod_base = OTHER; note = 2'O-Methyl ribonucleotide
  modified_base 107..109: mod_base = OTHER; note = Phosphorothioate linkage
atgttgatccatccaacagattgttgagaatcgaaagattcttaataaggcatccttccgatgctgacttctcaccgtccgttttccaataggagcgggcggtatgtttt

SEQ ID NO: 476 - RNA, 110 nt, synthetic construct
  source 1..110: mol_type = other RNA
  misc_feature 1..110: note = Category: MG3-6/3-4 sgRNA targeting ANGPTL3
  misc_feature 1..110: note = Description: MG3-6/3-4 ANGPTL3 F12
  modified_base 1..3: mod_base = OTHER; note = 2'O-Methyl ribonucleotide
  modified_base 1..3: mod_base = OTHER; note = Phosphorothioate linkage
  modified_base 108..110: mod_base = OTHER; note = 2'O-Methyl ribonucleotide
  modified_base 107..109: mod_base = OTHER; note = Phosphorothioate linkage
catccaacagattcagaaagctgttgagaatcgaaagattcttaataaggcatccttccgatgctgacttctcaccgtccgttttccaataggagcgggcggtatgtttt

SEQ ID NO: 477 - RNA, 110 nt, synthetic construct
  source 1..110: mol_type = other RNA
  misc_feature 1..110: note = Category: MG3-6/3-4 sgRNA targeting ANGPTL3
  misc_feature 1..110: note = Description: MG3-6/3-4 ANGPTL3 G12
  modified_base 1..3: mod_base = OTHER; note = 2'O-Methyl ribonucleotide
  modified_base 1..3: mod_base = OTHER; note = Phosphorothioate linkage
  modified_base 108..110: mod_base = OTHER; note = 2'O-Methyl ribonucleotide
  modified_base 107..109: mod_base = OTHER; note = Phosphorothioate linkage
gcctcagttcattcaaagctttgttgagaatcgaaagattcttaataaggcatccttccgatgctgacttctcaccgtccgttttccaataggagcgggcggtatgtttt

SEQ ID NO: 478 - DNA, 22 bp, Homo sapiens
  source 1..22: mol_type = genomic DNA
  misc_feature 1..22: note = Category: DNA sequence of ANGPTL3 target site
  misc_feature 1..22: note = Description: MG3-6/3-4 ANGPTL3 A1
ttgttcctctagttatttcctc

SEQ ID NO: 479 - DNA, 22 bp, Homo sapiens
  source 1..22: mol_type = genomic DNA
  misc_feature 1..22: note = Category: DNA sequence of ANGPTL3 target site
  misc_feature 1..22: note = Description: MG3-6/3-4 ANGPTL3 B1
atttgattctctatctccagag

SEQ ID NO: 480 - DNA, 22 bp, Homo sapiens
  source 1..22: mol_type = genomic DNA
  misc_feature 1..22: note = Category: DNA sequence of ANGPTL3 target site
  misc_feature 1..22: note = Description: MG3-6/3-4 ANGPTL3 C1
tttgattctctatctccagagc

SEQ ID NO: 481 - DNA, 22 bp, Homo sapiens
  source 1..22: mol_type = genomic DNA
  misc_feature 1..22: note = Category: DNA sequence of ANGPTL3 target site
  misc_feature 1..22: note = Description: MG3-6/3-4 ANGPTL3 D1
aagatttgctatgttagacgat

SEQ ID NO: 482 - DNA, 22 bp, Homo sapiens
  source 1..22: mol_type = genomic DNA
  misc_feature 1..22: note = Category: DNA sequence of ANGPTL3 target site
  misc_feature 1..22: note = Description: MG3-6/3-4 ANGPTL3 E1
agatttgctatgttagacgatg

SEQ ID NO: 483 - DNA, 22 bp, Homo sapiens
  source 1..22: mol_type = genomic DNA
  misc_feature 1..22: note = Category: DNA sequence of ANGPTL3 target site
  misc_feature 1..22: note = Description: MG3-6/3-4 ANGPTL3 F1
gatttgctatgttagacgatgt

SEQ ID NO: 484 - DNA, 22 bp, Homo sapiens
  source 1..22: mol_type = genomic DNA
  misc_feature 1..22: note = Category: DNA sequence of ANGPTL3 target site
  misc_feature 1..22: note = Description: MG3-6/3-4 ANGPTL3 G1
actttgtccataagacgaaggg

SEQ ID NO: 485 - DNA, 22 bp, Homo sapiens
  source 1..22: mol_type = genomic DNA
  misc_feature 1..22: note = Category: DNA sequence of ANGPTL3 target site
  misc_feature 1..22: note = Description: MG3-6/3-4 ANGPTL3 H1
agggccaaattaatgacatatt

SEQ ID NO: 486 - DNA, 22 bp, Homo sapiens
  source 1..22: mol_type = genomic DNA
  misc_feature 1..22: note = Category: DNA sequence of ANGPTL3 target site
  misc_feature 1..22: note = Description: MG3-6/3-4 ANGPTL3 A2
gggccaaattaatgacatattt

SEQ ID NO: 487 - DNA, 22 bp, Homo sapiens
  source 1..22: mol_type = genomic DNA
  misc_feature 1..22: note = Category: DNA sequence of ANGPTL3 target site
  misc_feature 1..22: note = Description: MG3-6/3-4 ANGPTL3 B2
tatgatctatcgctgcaaacca

SEQ ID NO: 488 - DNA, 22 bp, Homo sapiens
  source 1..22: mol_type = genomic DNA
  misc_feature 1..22: note = Category: DNA sequence of ANGPTL3 target site
  misc_feature 1..22: note = Description: MG3-6/3-4 ANGPTL3 C2
atgatctatcgctgcaaaccag

SEQ ID NO: 489 - DNA, 22 bp, Homo sapiens
  source 1..22: mol_type = genomic DNA
  misc_feature 1..22: note = Category: DNA sequence of ANGPTL3 target site
  misc_feature 1..22: note = Description: MG3-6/3-4 ANGPTL3 D2
caaaccagtgaaatcaaagaag

SEQ ID NO: 490 - DNA, 22 bp, Homo sapiens
  source 1..22: mol_type = genomic DNA
  misc_feature 1..22: note = Category: DNA sequence of ANGPTL3 target site
  misc_feature 1..22: note = Description: MG3-6/3-4 ANGPTL3 E2
aaaccagtgaaatcaaagaaga

SEQ ID NO: 491 - DNA, 22 bp, Homo sapiens
  source 1..22: mol_type = genomic DNA
  misc_feature 1..22: note = Category: DNA sequence of ANGPTL3 target site
  misc_feature 1..22: note = Description: MG3-6/3-4 ANGPTL3 F2
acaagtcaaaaatgaagaggta

SEQ ID NO: 492 - DNA, 22 bp, Homo sapiens
  source 1..22: mol_type = genomic DNA
  misc_feature 1..22: note = Category: DNA sequence of ANGPTL3 target site
  misc_feature 1..22: note = Description: MG3-6/3-4 ANGPTL3 G2
gaatatgtcacttgaactcaac

SEQ ID NO: 493 - DNA, 22 bp, Homo sapiens
  source 1..22: mol_type = genomic DNA
  misc_feature 1..22: note = Category: DNA sequence of ANGPTL3 target site
  misc_feature 1..22: note = Description: MG3-6/3-4 ANGPTL3 H2
tcacttgaactcaactcaaaac

SEQ ID NO: 494 - DNA, 22 bp, Homo sapiens
  source 1..22: mol_type = genomic DNA
  misc_feature 1..22: note = Category: DNA sequence of ANGPTL3 target site
  misc_feature 1..22: note = Description: MG3-6/3-4 ANGPTL3 A3
tcaaaacttgaaagcctcctag

SEQ ID NO: 495 - DNA, 22 bp, Homo sapiens
  source 1..22: mol_type = genomic DNA
  misc_feature 1..22: note = Category: DNA sequence of ANGPTL3 target site
  misc_feature 1..22: note = Description: MG3-6/3-4 ANGPTL3 B3
caaaacttgaaagcctcctaga

SEQ ID NO: 496 - DNA, 22 bp, Homo sapiens
  source 1..22: mol_type = genomic DNA
  misc_feature 1..22: note = Category: DNA sequence of ANGPTL3 target site
  misc_feature 1..22: note = Description: MG3-6/3-4 ANGPTL3 C3
aaaacttgaaagcctcctagaa

SEQ ID NO: 497 - DNA, 22 bp, Homo sapiens
  source 1..22: mol_type = genomic DNA
  misc_feature 1..22: note = Category: DNA sequence of ANGPTL3 target site
  misc_feature 1..22: note = Description: MG3-6/3-4 ANGPTL3 D3
aaacttgaaagcctcctagaag

SEQ ID NO: 498 - DNA, 22 bp, Homo sapiens
  source 1..22: mol_type = genomic DNA
  misc_feature 1..22: note = Category: DNA sequence of ANGPTL3 target site
  misc_feature 1..22: note = Description: MG3-6/3-4 ANGPTL3 E3
aacttgaaagcctcctagaaga

SEQ ID NO: 499 - DNA, 22 bp, Homo sapiens
  source 1..22: mol_type = genomic DNA
  misc_feature 1..22: note = Category: DNA sequence of ANGPTL3 target site
  misc_feature 1..22: note = Description: MG3-6/3-4 ANGPTL3 F3
gttctggagtttcaggttgatt

SEQ ID NO: 500 - DNA, 22 bp, Homo sapiens
  source 1..22: mol_type = genomic DNA
  misc_feature 1..22: note = Category: DNA sequence of ANGPTL3 target site
  misc_feature 1..22: note = Description: MG3-6/3-4 ANGPTL3 G3
cactggtttgcagcgatagatc

SEQ ID NO: 501 - DNA, 22 bp, Homo sapiens
  source 1..22: mol_type = genomic DNA
  misc_feature 1..22: note = Category: DNA sequence of ANGPTL3 target site
  misc_feature 1..22: note = Description: MG3-6/3-4 ANGPTL3 H3
actggtttgcagcgatagatca

SEQ ID NO: 502 - DNA, 22 bp, Homo sapiens
  source 1..22: mol_type = genomic DNA
  misc_feature 1..22: note = Category: DNA sequence of ANGPTL3 target site
  misc_feature 1..22: note = Description: MG3-6/3-4 ANGPTL3 A4
cgatagatcataaaaagactga

SEQ ID NO: 503 - DNA, 22 bp, Homo sapiens
  source 1..22: mol_type = genomic DNA
  misc_feature 1..22: note = Category: DNA sequence of ANGPTL3 target site
  misc_feature 1..22: note = Description: MG3-6/3-4 ANGPTL3 B4
cccaactgaaggaggccattgg

SEQ ID NO: 504 - DNA, 22 bp, Homo sapiens
  source 1..22: mol_type = genomic DNA
  misc_feature 1..22: note = Category: DNA sequence of ANGPTL3 target site
  misc_feature 1..22: note = Description: MG3-6/3-4 ANGPTL3 C4
ccaactgaaggaggccattggc

SEQ ID NO: 505 - DNA, 22 bp, Homo sapiens
  source 1..22: mol_type = genomic DNA
  misc_feature 1..22: note = Category: DNA sequence of ANGPTL3 target site
  misc_feature 1..22: note = Description: MG3-6/3-4 ANGPTL3 D4
cttgattttggctctggagata

SEQ ID NO: 506 - DNA, 22 bp, Homo sapiens
  source 1..22: mol_type = genomic DNA
  misc_feature 1..22: note = Category: DNA sequence of ANGPTL3 target site
  misc_feature 1..22: note = Description: MG3-6/3-4 ANGPTL3 E4
ttttggctctggagatagagaa

SEQ ID NO: 507 - DNA, 22 bp, Homo sapiens
  source 1..22: mol_type = genomic DNA
  misc_feature 1..22: note = Category: DNA sequence of ANGPTL3 target site
  misc_feature 1..22: note = Description: MG3-6/3-4 ANGPTL3 F4
tctggagatagagaatcaaatg

SEQ ID NO: 508 - DNA, 22 bp, Homo sapiens
  source 1..22: mol_type = genomic DNA
  misc_feature 1..22: note = Category: DNA sequence of ANGPTL3 target site
  misc_feature 1..22: note = Description: MG3-6/3-4 ANGPTL3 G4
gaattgtcttgatcaattctgg

SEQ ID NO: 509 - DNA, 22 bp, Homo sapiens
  source 1..22: mol_type = genomic DNA
  misc_feature 1..22: note = Category: DNA sequence of ANGPTL3 target site
  misc_feature 1..22: note = Description: MG3-6/3-4 ANGPTL3 H4
aattgtcttgatcaattctgga

SEQ ID NO: 510 - DNA, 22 bp, Homo sapiens
  source 1..22: mol_type = genomic DNA
  misc_feature 1..22: note = Category: DNA sequence of ANGPTL3 target site
  misc_feature 1..22: note = Description: MG3-6/3-4 ANGPTL3 A5
ggaggaaataactagaggaaca

SEQ ID NO: 511 - DNA, 22 bp, Homo sapiens
  source 1..22: mol_type = genomic DNA
  misc_feature 1..22: note = Category: DNA sequence of ANGPTL3 target site
  misc_feature 1..22: note = Description: MG3-6/3-4 ANGPTL3 B5
gaggaaataactagaggaacaa

SEQ ID NO: 512 - DNA, 22 bp, Homo sapiens
  source 1..22: mol_type = genomic DNA
  misc_feature 1..22: note = Category: DNA sequence of ANGPTL3 target site
  misc_feature 1..22: note = Description: MG3-6/3-4 ANGPTL3 C5
actctctatatccagacttttg

SEQ ID NO: 513 - DNA, 22 bp, Homo sapiens
  source 1..22: mol_type = genomic DNA
  misc_feature 1..22: note = Category: DNA sequence of ANGPTL3 target site
  misc_feature 1..22: note = Description: MG3-6/3-4 ANGPTL3 D5
ctctctatatccagacttttgt

SEQ ID NO: 514 - DNA, 22 bp, Homo sapiens
  source 1..22: mol_type = genomic DNA
  misc_feature 1..22: note = Category: DNA sequence of ANGPTL3 target site
  misc_feature 1..22: note = Description: MG3-6/3-4 ANGPTL3 E5
tctctatatccagacttttgta

SEQ ID NO: 515 - DNA, 22 bp, Homo sapiens
  source 1..22: mol_type = genomic DNA
  misc_feature 1..22: note = Category: DNA sequence of ANGPTL3 target site
  misc_feature 1..22: note = Description: MG3-6/3-4 ANGPTL3 F5
aacaattaaaccaacagcatag

SEQ ID NO: 516 - DNA, 22 bp, Homo sapiens
  source 1..22: mol_type = genomic DNA
  misc_feature 1..22: note = Category: DNA sequence of ANGPTL3 target site
  misc_feature 1..22: note = Description: MG3-6/3-4 ANGPTL3 G5
attaaaccaacagcatagtcaa

SEQ ID NO: 517 - DNA, 22 bp, Homo sapiens
  source 1..22: mol_type = genomic DNA
  misc_feature 1..22: note = Category: DNA sequence of ANGPTL3 target site
  misc_feature 1..22: note = Description: MG3-6/3-4 ANGPTL3 H5
aaccaacagcatagtcaaataa

SEQ ID NO: 518 - DNA, 22 bp, Homo sapiens
  source 1..22: mol_type = genomic DNA
  misc_feature 1..22: note = Category: DNA sequence of ANGPTL3 target site
  misc_feature 1..22: note = Description: MG3-6/3-4 ANGPTL3 A6
accaacagcatagtcaaataaa

SEQ ID NO: 519 - DNA, 22 bp, Homo sapiens
  source 1..22: mol_type = genomic DNA
  misc_feature 1..22: note = Category: DNA sequence of ANGPTL3 target site
  misc_feature 1..22: note = Description: MG3-6/3-4 ANGPTL3 B6
gatgctattatcttgtttttct

SEQ ID NO: 520 - DNA, 22 bp, Homo sapiens
  source 1..22: mol_type = genomic DNA
  misc_feature 1..22: note = Category: DNA sequence of ANGPTL3 target site
  misc_feature 1..22: note = Description: MG3-6/3-4 ANGPTL3 C6
aggactagtattcaagaaccca

SEQ ID NO: 521 - DNA, 22 bp, Homo sapiens
  source 1..22: mol_type = genomic DNA
  misc_feature 1..22: note = Category: DNA sequence of ANGPTL3 target site
  misc_feature 1..22: note = Description: MG3-6/3-4 ANGPTL3 D6
ggactagtattcaagaacccac

SEQ ID NO: 522 - DNA, 22 bp, Homo sapiens
  source 1..22: mol_type = genomic DNA
  misc_feature 1..22: note = Category: DNA sequence of ANGPTL3 target site
  misc_feature 1..22: note = Description: MG3-6/3-4 ANGPTL3 E6
aagaactactccctttcttcag

SEQ ID NO: 523 - DNA, 22 bp, Homo sapiens
  source 1..22: mol_type = genomic DNA
  misc_feature 1..22: note = Category: DNA sequence of ANGPTL3 target site
  misc_feature 1..22: note = Description: MG3-6/3-4 ANGPTL3 F6
actactccctttcttcagttga

SEQ ID NO: 524 - DNA, 22 bp, Homo sapiens
  source 1..22: mol_type = genomic DNA
  misc_feature 1..22: note = Category: DNA sequence of ANGPTL3 target site
  misc_feature 1..22: note = Description: MG3-6/3-4 ANGPTL3 G6
ctactccctttcttcagttgaa

SEQ ID NO: 525 - DNA, 22 bp, Homo sapiens
  source 1..22: mol_type = genomic DNA
  misc_feature 1..22: note = Category: DNA sequence of ANGPTL3 target site
  misc_feature 1..22: note = Description: MG3-6/3-4 ANGPTL3 H6
cctttcttcagttgaatgaaat

SEQ ID NO: 526 - DNA, 22 bp, Homo sapiens
  source 1..22: mol_type = genomic DNA
  misc_feature 1..22: note = Category: DNA sequence of ANGPTL3 target site
  misc_feature 1..22: note = Description: MG3-6/3-4 ANGPTL3 A7
ggtgctcttggcttggaagata

SEQ ID NO: 527 - DNA, 22 bp, Homo sapiens
  source 1..22: mol_type = genomic DNA
  misc_feature 1..22: note = Category: DNA sequence of ANGPTL3 target site
  misc_feature 1..22: note = Description: MG3-6/3-4 ANGPTL3 B7
gtgctcttggcttggaagatag

SEQ ID NO: 528 - DNA, 22 bp, Homo sapiens
  source 1..22: mol_type = genomic DNA
  misc_feature 1..22: note = Category: DNA sequence of ANGPTL3 target site
  misc_feature 1..22: note = Description: MG3-6/3-4 ANGPTL3 C7
atagagaaatttctgtgggttc

SEQ ID NO: 529 - DNA, 22 bp, Homo sapiens
  source 1..22: mol_type = genomic DNA
  misc_feature 1..22: note = Category: DNA sequence of ANGPTL3 target site
  misc_feature 1..22: note = Description: MG3-6/3-4 ANGPTL3 D7
gaatactagtccttctgagctg

SEQ ID NO: 530 - DNA, 22 bp, Homo sapiens
  source 1..22: mol_type = genomic DNA
  misc_feature 1..22: note = Category: DNA sequence of ANGPTL3 target site
  misc_feature 1..22: note = Description: MG3-6/3-4 ANGPTL3 E7
ttattgattctaggcattcctg

SEQ ID NO: 531 - DNA, 22 bp, Homo sapiens
  source 1..22: mol_type = genomic DNA
  misc_feature 1..22: note = Category: DNA sequence of ANGPTL3 target site
  misc_feature 1..22: note = Description: MG3-6/3-4 ANGPTL3 F7
gtctactgtgatgttatatcag

SEQ ID NO: 532 - DNA, 22 bp, Homo sapiens
  source 1..22: mol_type = genomic DNA
  misc_feature 1..22: note = Category: DNA sequence of ANGPTL3 target site
  misc_feature 1..22: note = Description: MG3-6/3-4 ANGPTL3 G7
ctgatataacatcacagtagac

SEQ ID NO: 533 - DNA, 22 bp, Homo sapiens
  source 1..22: mol_type = genomic DNA
  misc_feature 1..22: note = Category: DNA sequence of ANGPTL3 target site
  misc_feature 1..22: note = Description: MG3-6/3-4 ANGPTL3 H7
tgatataacatcacagtagaca

SEQ ID NO: 534 - DNA, 22 bp, Homo sapiens
  source 1..22: mol_type = genomic DNA
  misc_feature 1..22: note = Category: DNA sequence of ANGPTL3 target site
  misc_feature 1..22: note = Description: MG3-6/3-4 ANGPTL3 A8
gatataacatcacagtagacat

SEQ ID NO: 535 - DNA, 22 bp, Homo sapiens
  source 1..22: mol_type = genomic DNA
  misc_feature 1..22: note = Category: DNA sequence of ANGPTL3 target site
  misc_feature 1..22: note = Description: MG3-6/3-4 ANGPTL3 B8
cacttgtatgttcacctctgtt

SEQ ID NO: 536 - DNA, 22 bp, Homo sapiens
  source 1..22: mol_type = genomic DNA
  misc_feature 1..22: note = Category: DNA sequence of ANGPTL3 target site
  misc_feature 1..22: note = Description: MG3-6/3-4 ANGPTL3 C8
tataaatggtggtacattcagc

SEQ ID NO: 537 - DNA, 22 bp, Homo sapiens
  source 1..22: mol_type = genomic DNA
  misc_feature 1..22: note = Category: DNA sequence of ANGPTL3 target site
  misc_feature 1..22: note = Description: MG3-6/3-4 ANGPTL3 D8
tggtacattcagcaggaatgcc

SEQ ID NO: 538 - DNA, 22 bp, Homo sapiens
  source 1..22: mol_type = genomic DNA
  misc_feature 1..22: note = Category: DNA sequence of ANGPTL3 target site
  misc_feature 1..22: note = Description: MG3-6/3-4 ANGPTL3 E8
gtccatggacattaattcaaca

SEQ ID NO: 539 - DNA, 22 bp, Homo sapiens
  source 1..22: mol_type = genomic DNA
  misc_feature 1..22: note = Category: DNA sequence of ANGPTL3 target site
  misc_feature 1..22: note = Description: MG3-6/3-4 ANGPTL3 F8
ttcaacatcgaatagatggatc

SEQ ID NO: 540 - DNA, 22 bp, Homo sapiens
  source 1..22: mol_type = genomic DNA
  misc_feature 1..22: note = Category: DNA sequence of ANGPTL3 target site
  misc_feature 1..22: note = Description: MG3-6/3-4 ANGPTL3 G8
atagatggatcacaaaacttca

SEQ ID NO: 541 - DNA, 22 bp, Homo sapiens
  source 1..22: mol_type = genomic DNA
  misc_feature 1..22: note = Category: DNA sequence of ANGPTL3 target site
  misc_feature 1..22: note = Description: MG3-6/3-4 ANGPTL3 H8
ttcaatgaaacgtgggagaact

SEQ ID NO: 542 - DNA, 22 bp, Homo sapiens
  source 1..22: mol_type = genomic DNA
  misc_feature 1..22: note = Category: DNA sequence of ANGPTL3 target site
  misc_feature 1..22: note = Description: MG3-6/3-4 ANGPTL3 A9
agtccccttaccatcaagcctc

SEQ ID NO: 543 - DNA, 22 bp, Homo sapiens
  source 1..22: mol_type = genomic DNA
  misc_feature 1..22: note = Category: DNA sequence of ANGPTL3 target site
  misc_feature 1..22: note = Description: MG3-6/3-4 ANGPTL3 B9
tttgtgatccatctattcgatg

SEQ ID NO: 544 - DNA, 22 bp, Homo sapiens
  source 1..22: mol_type = genomic DNA
  misc_feature 1..22: note = Category: DNA sequence of ANGPTL3 target site
  misc_feature 1..22: note = Description: MG3-6/3-4 ANGPTL3 C9
tgaattaatgtccatggactac

SEQ ID NO: 545 - DNA, 22 bp, Homo sapiens
  source 1..22: mol_type = genomic DNA
  misc_feature 1..22: note = Category: DNA sequence of ANGPTL3 target site
  misc_feature 1..22: note = Description: MG3-6/3-4 ANGPTL3 D9
tttacgaattgagttggaagac

SEQ ID NO: 546 - DNA, 22 bp, Homo sapiens
  source 1..22: mol_type = genomic DNA
  misc_feature 1..22: note = Category: DNA sequence of ANGPTL3 target site
  misc_feature 1..22: note = Description: MG3-6/3-4 ANGPTL3 E9
ggcaatgtccccaatgcaatcc

SEQ ID NO: 547 - DNA, 22 bp, Homo sapiens
  source 1..22: mol_type = genomic DNA
  misc_feature 1..22: note = Category: DNA sequence of ANGPTL3 target site
  misc_feature 1..22: note = Description: MG3-6/3-4 ANGPTL3 F9
gcaatgtccccaatgcaatccc

SEQ ID NO: 548 - DNA, 22 bp, Homo sapiens
  source 1..22: mol_type = genomic DNA
  misc_feature 1..22: note = Category: DNA sequence of ANGPTL3 target site
  misc_feature 1..22: note = Description: MG3-6/3-4 ANGPTL3 G9
gttttctacttgggatcacaaa

SEQ ID NO: 549 - DNA, 22 bp, Homo sapiens
  source 1..22: mol_type = genomic DNA
  misc_feature 1..22: note = Category: DNA sequence of ANGPTL3 target site
  misc_feature 1..22: note = Description: MG3-6/3-4 ANGPTL3 H9
ccttttgctttgtgatcccaag

SEQ ID NO: 550 - DNA, 22 bp, Homo sapiens
  source 1..22: mol_type = genomic DNA
  misc_feature 1..22: note = Category: DNA sequence of ANGPTL3 target site
  misc_feature 1..22: note = Description: MG3-6/3-4 ANGPTL3 A10
cttttgctttgtgatcccaagt

SEQ ID NO: 551 - DNA, 22 bp, Homo sapiens
  source 1..22: mol_type = genomic DNA
  misc_feature 1..22: note = Category: DNA sequence of ANGPTL3 target site
  misc_feature 1..22: note = Description: MG3-6/3-4 ANGPTL3 B10
ttgtgatcccaagtagaaaaca

SEQ ID NO: 552 - DNA, 22 bp, Homo sapiens
  source 1..22: mol_type = genomic DNA
  misc_feature 1..22: note = Category: DNA sequence of ANGPTL3 target site
  misc_feature 1..22: note = Description: MG3-6/3-4 ANGPTL3 C10
agttggtttcgtgatttcccaa

SEQ ID NO: 553 - DNA, 22 bp, Homo sapiens
  source 1..22: mol_type = genomic DNA
  misc_feature 1..22: note = Category: DNA sequence of ANGPTL3 target site
  misc_feature 1..22: note = Description: MG3-6/3-4 ANGPTL3 D10
gttggtttcgtgatttcccaag

SEQ ID NO: 554 - DNA, 22 bp, Homo sapiens
  source 1..22: mol_type = genomic DNA
  misc_feature 1..22: note = Category: DNA sequence of ANGPTL3 target site
  misc_feature 1..22: note = Description: MG3-6/3-4 ANGPTL3 E10
gtttcgtgatttcccaagtaaa

SEQ ID NO: 555 - DNA, 22 bp, Homo sapiens
  source 1..22: mol_type = genomic DNA
  misc_feature 1..22: note = Category: DNA sequence of ANGPTL3 target site
  misc_feature 1..22: note = Description: MG3-6/3-4 ANGPTL3 F10
ttccagtcttccaactcaattc

SEQ ID NO: 556 - DNA, 22 bp, Homo sapiens
  source 1..22: mol_type = genomic DNA
  misc_feature 1..22: note = Category: DNA sequence of ANGPTL3 target site
  misc_feature 1..22: note = Description: MG3-6/3-4 ANGPTL3 G10
agtatatcttctctaggcccaa

SEQ ID NO: 557 - DNA, 22 bp, Homo sapiens
  source 1..22: mol_type = genomic DNA
  misc_feature 1..22: note = Category: DNA sequence of ANGPTL3 target site
  misc_feature 1..22: note = Description: MG3-6/3-4 ANGPTL3 H10
gtatatcttctctaggcccaac

SEQ ID NO: 558 - DNA, 22 bp, Homo sapiens
  source 1..22: mol_type = genomic DNA
  misc_feature 1..22: note = Category: DNA sequence of ANGPTL3 target site
  misc_feature 1..22: note = Description: MG3-6/3-4 ANGPTL3 A11
tctaggcccaaccaaaattctc

SEQ ID NO: 559 - DNA, 22 bp, Homo sapiens
  source 1..22: mol_type = genomic DNA
  misc_feature 1..22: note = Category: DNA sequence of ANGPTL3 target site
  misc_feature 1..22: note = Description: MG3-6/3-4 ANGPTL3 B11
ctaggcccaaccaaaattctcc

SEQ ID NO: 560 - DNA, 22 bp, Homo sapiens
  source 1..22: mol_type = genomic DNA
  misc_feature 1..22: note = Category: DNA sequence of ANGPTL3 target site
  misc_feature 1..22: note = Description: MG3-6/3-4 ANGPTL3 C11
gcccaaccaaaattctcctgaa

SEQ ID NO: 561 - DNA, 22 bp, Homo sapiens
  source 1..22: mol_type = genomic DNA
  misc_feature 1..22: note = Category: DNA sequence of ANGPTL3 target site
  misc_feature 1..22: note = Description: MG3-6/3-4 ANGPTL3 D11
tggtggtggcatgatgagtgtg

SEQ ID NO: 562 - DNA, 22 bp, Homo sapiens
  source 1..22: mol_type = genomic DNA
  misc_feature 1..22: note = Category: DNA sequence of ANGPTL3 target site
  misc_feature 1..22: note = Description: MG3-6/3-4 ANGPTL3 E11
ggtggtggcatgatgagtgtgg

SEQ ID NO: 563 - DNA, 22 bp, Homo sapiens
  source 1..22: mol_type = genomic DNA
  misc_feature 1..22: note = Category: DNA sequence of ANGPTL3 target site
  misc_feature 1..22: note = Description: MG3-6/3-4 ANGPTL3 F11
tgatgagtgtggagaaaacaac

SEQ ID NO: 564 - DNA, 22 bp, Homo sapiens
  source 1..22: mol_type = genomic DNA
  misc_feature 1..22: note = Category: DNA sequence of ANGPTL3 target site
  misc_feature 1..22: note = Description: MG3-6/3-4 ANGPTL3 G11
tgtggagaaaacaacctaaatg

SEQ ID NO: 565 - DNA, 22 bp, Homo sapiens
  source 1..22: mol_type = genomic DNA
  misc_feature 1..22: note = Category: DNA sequence of ANGPTL3 target site
  misc_feature 1..22: note = Description: MG3-6/3-4 ANGPTL3 H11
ggtaaatataacaaaccaagag

SEQ ID NO: 566 - DNA, 22 bp, Homo sapiens
  source 1..22: mol_type = genomic DNA
  misc_feature 1..22: note = Category: DNA sequence of ANGPTL3 target site
  misc_feature 1..22: note = Description: MG3-6/3-4 ANGPTL3 A12
gaagaggattatcttggaagtc

SEQ ID NO: 567 - DNA, 22 bp, Homo sapiens
  source 1..22: mol_type = genomic DNA
  misc_feature 1..22: note = Category: DNA sequence of ANGPTL3 target site
  misc_feature 1..22: note = Description: MG3-6/3-4 ANGPTL3 B12
aagaggattatcttggaagtct

SEQ ID NO: 568 - DNA, 22 bp, Homo sapiens
  source 1..22: mol_type = genomic DNA
  misc_feature 1..22: note = Category: DNA sequence of ANGPTL3 target site
  misc_feature 1..22: note = Description: MG3-6/3-4 ANGPTL3 C12
tcaaaatggaaggttatactct

SEQ ID NO: 569 - DNA, 22 bp, Homo sapiens
  source 1..22: mol_type = genomic DNA
  misc_feature 1..22: note = Category: DNA sequence of ANGPTL3 target site
  misc_feature 1..22: note = Description: MG3-6/3-4 ANGPTL3 D12
caaaatggaaggttatactcta

SEQ ID NO: 570 - DNA, 22 bp, Homo sapiens
  source 1..22: mol_type = genomic DNA
  misc_feature 1..22: note = Category: DNA sequence of ANGPTL3 target site
  misc_feature 1..22: note = Description: MG3-6/3-4 ANGPTL3 E12
atgttgatccatccaacagatt

SEQ ID NO: 571 - DNA, 22 bp, Homo sapiens
  source 1..22: mol_type = genomic DNA
  misc_feature 1..22: note = Category: DNA sequence of ANGPTL3 target site
  misc_feature 1..22: note = Description: MG3-6/3-4 ANGPTL3 F12
catccaacagattcagaaagct

SEQ ID NO: 572 - DNA, 22 bp, Homo sapiens
  source 1..22: mol_type = genomic DNA
  misc_feature 1..22: note = Category: DNA sequence of ANGPTL3 target site
  misc_feature 1..22: note = Description: MG3-6/3-4 ANGPTL3 G12
gcctcagttcattcaaagcttt

SEQ ID NO: 573 - RNA, 110 nt, synthetic construct
  source 1..110: mol_type = other RNA
  misc_feature 1..110: note = Category: MG3-6/3-4 sgRNA targeting PCSK9
  misc_feature 1..110: note = Description: MG3-6/3-4 PCSK9 A1
  modified_base 1..3: mod_base = OTHER; note = 2'O-Methyl ribonucleotide
  modified_base 1..3: mod_base = OTHER; note = Phosphorothioate linkage
  modified_base 108..110: mod_base = OTHER; note = 2'O-Methyl ribonucleotide
  modified_base 107..109: mod_base = OTHER; note = Phosphorothioate linkage
acccctccacggtaccgggcgggttgagaatcgaaagattcttaataaggcatccttccgatgctgacttctcaccgtccgttttccaataggagcgggcggtatgtttt

SEQ ID NO: 574 - RNA, 110 nt, synthetic construct
  source 1..110: mol_type = other RNA
  misc_feature 1..110: note = Category: MG3-6/3-4 sgRNA targeting PCSK9
  misc_feature 1..110: note = Description: MG3-6/3-4 PCSK9 B1
  modified_base 1..3: mod_base = OTHER; note = 2'O-Methyl ribonucleotide
  modified_base 1..3: mod_base = OTHER; note = Phosphorothioate linkage
  modified_base 108..110: mod_base = OTHER; note = 2'O-Methyl ribonucleotide
  modified_base 107..109: mod_base = OTHER; note = Phosphorothioate linkage
accagcatacagagtgaccaccgttgagaatcgaaagattcttaataaggcatccttccgatgctgacttctcaccgtccgttttccaataggagcgggcggtatgtttt

SEQ ID NO: 575 - RNA, 110 nt, synthetic construct
  source 1..110: mol_type = other RNA
  misc_feature 1..110: note = Category: MG3-6/3-4 sgRNA targeting PCSK9
  misc_feature 1..110: note = Description: MG3-6/3-4 PCSK9 C1
  modified_base 1..3: mod_base = OTHER; note = 2'O-Methyl ribonucleotide
  modified_base 1..3: mod_base = OTHER; note = Phosphorothioate linkage
  modified_base 108..110: mod_base = OTHER; note = 2'O-Methyl ribonucleotide
  modified_base 107..109: mod_base = OTHER; note = Phosphorothioate linkage
ccagcatacagagtgaccaccggttgagaatcgaaagattcttaataaggcatccttccgatgctgacttctcaccgtccgttttccaataggagcgggcggtatgtttt

SEQ ID NO: 576 - RNA, 110 nt, synthetic construct
  source 1..110: mol_type = other RNA
  misc_feature 1..110: note = Category: MG3-6/3-4 sgRNA targeting PCSK9
  misc_feature 1..110: note = Description: MG3-6/3-4 PCSK9 D1
  modified_base 1..3: mod_base = OTHER; note = 2'O-Methyl ribonucleotide
  modified_base 1..3: mod_base = OTHER; note = Phosphorothioate linkage
  modified_base 108..110: mod_base = OTHER; note = 2'O-Methyl ribonucleotide
  modified_base 107..109: mod_base = OTHER; note = Phosphorothioate linkage
cagggtcatggtcaccgacttcgttgagaatcgaaagattcttaataaggcatccttccgatgctgacttctcaccgtccgttttccaataggagcgggcggtatgtttt

SEQ ID NO: 577 - RNA, 110 nt, synthetic construct
  source 1..110: mol_type = other RNA
  misc_feature 1..110: note = Category: MG3-6/3-4 sgRNA targeting PCSK9
  misc_feature 1..110: note = Description: MG3-6/3-4 PCSK9 E1
  modified_base 1..3: mod_base = OTHER; note = 2'O-Methyl ribonucleotide
  modified_base 1..3: mod_base = OTHER; note = Phosphorothioate linkage
  modified_base 108..110: mod_base = OTHER; note = 2'O-Methyl ribonucleotide
  modified_base 107..109: mod_base = OTHER; note = Phosphorothioate linkage
cctcccaggcctggagtttattgttgagaatcgaaagattcttaataaggcatccttccgatgctgacttctcaccgtccgttttccaataggagcgggcggtatgtttt

SEQ ID NO: 578 - RNA, 110 nt, synthetic construct
  source 1..110: mol_type = other RNA
  misc_feature 1..110: note = Category: MG3-6/3-4 sgRNA targeting PCSK9
  misc_feature 1..110: note = Description: MG3-6/3-4 PCSK9 F1
  modified_base 1..3: mod_base = OTHER; note = 2'O-Methyl ribonucleotide
  modified_base 1..3: mod_base = OTHER; note = Phosphorothioate linkage
  modified_base 108..110: mod_base = OTHER; note = 2'O-Methyl ribonucleotide
  modified_base 107..109: mod_base = OTHER; note = Phosphorothioate linkage
ctcccaggcctggagtttattcgttgagaatcgaaagattcttaataaggcatccttccgatgctgacttctcaccgtccgttttccaataggagcgggcggtatgtttt

SEQ ID NO: 579 - RNA, 110 nt, synthetic construct
  source 1..110: mol_type = other RNA
  misc_feature 1..110: note = Category: MG3-6/3-4 sgRNA targeting PCSK9
  misc_feature 1..110: note = Description: MG3-6/3-4 PCSK9 G1
  modified_base 1..3: mod_base = OTHER; note = 2'O-Methyl ribonucleotide
  modified_base 1..3: mod_base = OTHER; note = Phosphorothioate linkage
  modified_base 108..110: mod_base = OTHER; note = 2'O-Methyl ribonucleotide
  modified_base 107..109: mod_base = OTHER; note = Phosphorothioate linkage
caggctggaccagctggcttttgttgagaatcgaaagattcttaataaggcatccttccgatgctgacttctcaccgtccgttttccaataggagcgggcggtatgtttt

SEQ ID NO: 580 - RNA, 110 nt, synthetic construct
  source 1..110: mol_type = other RNA
  misc_feature 1..110: note = Category: MG3-6/3-4 sgRNA targeting PCSK9
  misc_feature 1..110: note = Description: MG3-6/3-4 PCSK9 H1
  modified_base 1..3: mod_base = OTHER; note = 2'O-Methyl ribonucleotide
  modified_base 1..3: mod_base = OTHER; note = Phosphorothioate linkage
  modified_base 108..110: mod_base = OTHER; note = 2'O-Methyl ribonucleotide
  modified_base 107..109: mod_base = OTHER; note = Phosphorothioate linkage
ggtggccccaactgtgatgaccgttgagaatcgaaagattcttaataaggcatccttccgatgctgacttctcaccgtccgttttccaataggagcgggcggtatgtttt

SEQ ID NO: 581 - RNA, 110 nt, synthetic construct
  source 1..110: mol_type = other RNA
  misc_feature 1..110: note = Category: MG3-6/3-4 sgRNA targeting PCSK9
  misc_feature 1..110: note = Description: MG3-6/3-4 PCSK9 A2
  modified_base 1..3: mod_base = OTHER; note = 2'O-Methyl ribonucleotide
  modified_base 1..3: mod_base = OTHER; note = Phosphorothioate linkage
  modified_base 108..110: mod_base = OTHER; note = 2'O-Methyl ribonucleotide
  modified_base 107..109: mod_base = OTHER; note = Phosphorothioate linkage
gccccgccgcttcccactcctggttgagaatcgaaagattcttaataaggcatccttccgatgctgacttctcaccgtccgttttccaataggagcgggcggtatgtttt

SEQ ID NO: 582 - RNA, 110 nt, synthetic construct
  source 1..110: mol_type = other RNA
  misc_feature 1..110: note = Category: MG3-6/3-4 sgRNA targeting PCSK9
  misc_feature 1..110: note = Description: MG3-6/3-4 PCSK9 B2
  modified_base 1..3: mod_base = OTHER; note = 2'O-Methyl ribonucleotide
  modified_base 1..3: mod_base = OTHER; note = Phosphorothioate linkage
  modified_base 108..110: mod_base = OTHER; note = 2'O-Methyl ribonucleotide
  modified_base 107..109: mod_base = OTHER; note = Phosphorothioate linkage
agtgtgctgaccatacagtcctgttgagaatcgaaagattcttaataaggcatccttccgatgctgacttctcaccgtccgttttccaataggagcgggcggtatgtttt

SEQ ID NO: 583 - RNA, 110 nt, synthetic construct
  source 1..110: mol_type = other RNA
  misc_feature 1..110: note = Category: MG3-6/3-4 sgRNA targeting PCSK9
  misc_feature 1..110: note = Description: MG3-6/3-4 PCSK9 C2
  modified_base 1..3: mod_base = OTHER; note = 2'O-Methyl ribonucleotide
  modified_base 1..3: mod_base = OTHER; note = Phosphorothioate linkage
  modified_base 108..110: mod_base = OTHER; note = 2'O-Methyl ribonucleotide
  modified_base 107..109: mod_base = OTHER; note = Phosphorothioate linkage
cctgcaaaacagctgccaacctgttgagaatcgaaagattcttaataaggcatccttccgatgctgacttctcaccgtccgttttccaataggagcgggcggtatgtttt

SEQ ID NO: 584 - RNA, 110 nt, synthetic construct
  source 1..110: mol_type = other RNA
  misc_feature 1..110: note = Category: MG3-6/3-4 sgRNA targeting PCSK9
  misc_feature 1..110: note = Description: MG3-6/3-4 PCSK9 D2
  modified_base 1..3: mod_base = OTHER; note = 2'O-Methyl ribonucleotide
  modified_base 1..3: mod_base = OTHER; note = Phosphorothioate linkage
  modified_base 108..110: mod_base = OTHER; note = 2'O-Methyl ribonucleotide
  modified_base 107..109: mod_base = OTHER; note = Phosphorothioate linkage
ctgcaaaacagctgccaacctggttgagaatcgaaagattcttaataaggcatccttccgatgctgacttctcaccgtccgttttccaataggagcgggcggtatgtttt

SEQ ID NO: 585 - RNA, 110 nt, synthetic construct
  source 1..110: mol_type = other RNA
  misc_feature 1..110: note = Category: MG3-6/3-4 sgRNA targeting PCSK9
  misc_feature 1..110: note = Description: MG3-6/3-4 PCSK9 E2
  modified_base 1..3: mod_base = OTHER; note = 2'O-Methyl ribonucleotide
  modified_base 1..3: mod_base = OTHER; note = Phosphorothioate linkage
  modified_base 108..110: mod_base = OTHER; note = 2'O-Methyl ribonucleotide
  modified_base 107..109: mod_base = OTHER; note = Phosphorothioate linkage
aatggcgtagacaccctcacccgttgagaatcgaaagattcttaataaggcatccttccgatgctgacttctcaccgtccgttttccaataggagcgggcggtatgtttt

SEQ ID NO: 586 - RNA, 110 nt, synthetic construct
  source 1..110: mol_type = other RNA
  misc_feature 1..110: note = Category: MG3-6/3-4 sgRNA targeting PCSK9
  misc_feature 1..110: note = Description: MG3-6/3-4 PCSK9 F2
  modified_base 1..3: mod_base = OTHER; note = 2'O-Methyl ribonucleotide
  modified_base 1..3: mod_base = OTHER; note = Phosphorothioate linkage
  modified_base 108..110: mod_base = OTHER; note = 2'O-Methyl ribonucleotide
  modified_base 107..109: mod_base = OTHER; note = Phosphorothioate linkage
tcctgctgccatgccccaggtcgttgagaatcgaaagattcttaataaggcatccttccgatgctgacttctcaccgtccgttttccaataggagcgggcggtatgtttt

SEQ ID NO: 587 - RNA, 110 nt, synthetic construct
  source 1..110: mol_type = other RNA
  misc_feature 1..110: note = Category: MG3-6/3-4 sgRNA targeting PCSK9
  misc_feature 1..110: note = Description: MG3-6/3-4 PCSK9 G2
  modified_base 1..3: mod_base = OTHER; note = 2'O-Methyl ribonucleotide
  modified_base 1..3: mod_base = OTHER; note = Phosphorothioate linkage
  modified_base 108..110: mod_base = OTHER; note = 2'O-Methyl ribonucleotide
  modified_base 107..109: mod_base = OTHER; note = Phosphorothioate linkage
tggaatgcaaagtcaaggagcagttgagaatcgaaagattcttaataaggcatccttccgatgctgacttctcaccgtccgttttccaataggagcgggcggtatgtttt

SEQ ID NO: 588 - DNA, 22 bp, Homo sapiens
  source 1..22: mol_type = genomic DNA
  misc_feature 1..22: note = Category: DNA sequence of PSCK9 target site
  misc_feature 1..22: note = Description: MG3-6/3-4 PCSK9 A1
acccctccacggtaccgggcgg

SEQ ID NO: 589 - DNA, 22 bp, Homo sapiens
  source 1..22: mol_type = genomic DNA
  misc_feature 1..22: note = Category: DNA sequence of PSCK9 target site
  misc_feature 1..22: note = Description: MG3-6/3-4 PCSK9 B1
accagcatacagagtgaccacc

SEQ ID NO: 590 - DNA, 22 bp, Homo sapiens
  source 1..22: mol_type = genomic DNA
  misc_feature 1..22: note = Category: DNA sequence of PSCK9 target site
  misc_feature 1..22: note = Description: MG3-6/3-4 PCSK9 C1
ccagcatacagagtgaccaccg

SEQ ID NO: 591 - DNA, 22 bp, Homo sapiens
  source 1..22: mol_type = genomic DNA
  misc_feature 1..22: note = Category: DNA sequence of PSCK9 target site
  misc_feature 1..22: note = Description: MG3-6/3-4 PCSK9 D1
cagggtcatggtcaccgacttc

SEQ ID NO: 592 - DNA, 22 bp, Homo sapiens
  source 1..22: mol_type = genomic DNA
  misc_feature 1..22: note = Category: DNA sequence of PSCK9 target site
  misc_feature 1..22: note = Description: MG3-6/3-4 PCSK9 E1
cctcccaggcctggagtttatt

SEQ ID NO: 593 - DNA, 22 bp, Homo sapiens
  source 1..22: mol_type = genomic DNA
  misc_feature 1..22: note = Category: DNA sequence of PSCK9 target site
  misc_feature 1..22: note = Description: MG3-6/3-4 PCSK9 F1
ctcccaggcctggagtttattc

SEQ ID NO: 594 - DNA, 22 bp, Homo sapiens
  source 1..22: mol_type = genomic DNA
  misc_feature 1..22: note = Category: DNA sequence of PSCK9 target site
  misc_feature 1..22: note = Description: MG3-6/3-4 PCSK9 G1
caggctggaccagctggctttt

SEQ ID NO: 595 - DNA, 22 bp, Homo sapiens
  source 1..22: mol_type = genomic DNA
  misc_feature 1..22: note = Category: DNA sequence of PSCK9 target site
  misc_feature 1..22: note = Description: MG3-6/3-4 PCSK9 H1
ggtggccccaactgtgatgacc

SEQ ID NO: 596 - DNA, 22 bp, Homo sapiens
  source 1..22: mol_type = genomic DNA
  misc_feature 1..22: note = Category: DNA sequence of PSCK9 target site
  misc_feature 1..22: note = Description: MG3-6/3-4 PCSK9 A2
gccccgccgcttcccactcctg

SEQ ID NO: 597 - DNA, 22 bp, Homo sapiens
  source 1..22: mol_type = genomic DNA
  misc_feature 1..22: note = Category: DNA sequence of PSCK9 target site
  misc_feature 1..22: note = Description: MG3-6/3-4 PCSK9 B2
agtgtgctgaccatacagtcct

SEQ ID NO: 598 - DNA, 22 bp, Homo sapiens
  source 1..22: mol_type = genomic DNA
  misc_feature 1..22: note = Category: DNA sequence of PSCK9 target site
  misc_feature 1..22: note = Description: MG3-6/3-4 PCSK9 C2
cctgcaaaacagctgccaacct

SEQ ID NO: 599 - DNA, 22 bp, Homo sapiens
  source 1..22: mol_type = genomic DNA
  misc_feature 1..22: note = Category: DNA sequence of PSCK9 target site
  misc_feature 1..22: note = Description: MG3-6/3-4 PCSK9 D2
ctgcaaaacagctgccaacctg

SEQ ID NO: 600 - DNA, 22 bp, Homo sapiens
  source 1..22: mol_type = genomic DNA
  misc_feature 1..22: note = Category: DNA sequence of PSCK9 target site
  misc_feature 1..22: note = Description: MG3-6/3-4 PCSK9 E2
aatggcgtagacaccctcaccc

SEQ ID NO: 601 - DNA, 22 bp, Homo sapiens
  source 1..22: mol_type = genomic DNA
  misc_feature 1..22: note = Category: DNA sequence of PSCK9 target site
  misc_feature 1..22: note = Description: MG3-6/3-4 PCSK9 F2
tcctgctgccatgccccaggtc

SEQ ID NO: 602 - DNA, 22 bp, Homo sapiens
  source 1..22: mol_type = genomic DNA
  misc_feature 1..22: note = Category: DNA sequence of PSCK9 target site
  misc_feature 1..22: note = Description: MG3-6/3-4 PCSK9 G2
tggaatgcaaagtcaaggagca

SEQ ID NO: 603 - DNA, 3705 bp, synthetic construct
  misc_feature 1..3705: note = Category: MG3-6/3-4 coding sequence
  misc_feature 1..3705: note = Description: DNA sequence of MG3-6/3-4 coding sequence
  source 1..3705: mol_type = other DNA
atgcatgcgcggccgcaagctttaatacgactcactataaggaaaagccagctccagcaggcgctgctcactcctccccatcctctccctctgtccctctgtccctctgaccctgcactgtcccagcaccatggcccccaagaagaagcggaaagttggcggcggaggcagcagcaccgacatgaagaactaccggatcggcgtggacgtgggcgatagatctgttggactggccgccatcgagttcgacgatgatggactgcccatccagaagctggccctggtcacctttagacacgatggcggactggaccccaccaagaacaagacccctatgagccggaaagagacacggggaatcgccagacggaccatgcggatgaacagagagcggaagcggcggctgagaaacctggacaacgtgctggaaaacctgggctactctgtgcctgagggccctgagcctgagacatatgaggcctggacaagcagagccctgctggcctctatcaaactggcctctgccgacgagctgaacgaacaccttgtcagagccgtgcggcacatggccagacatagaggatgggccaatccttggtggtccctggaccagctggaaaaggccagccaagagcctagcgagacattcgagatcatcctggccagagccagagagctgttcggcgagaaggtgcccgctaatcctacactgggaatgctgggagccctggccgctaacaatgaggtgctgctgaggcccagggacgagaagaagagaaagaccggatacgtgcggggcacccctctgatgtttgctcaagttcgacagggcgatcagctggccgagctgcggagaatttgtgaagtgcagggcatcgaggaccagtacgaggctctgagactgggcgtgttcgaccacaagcacccctacgtgcccaaagaaagagtgggcaaagaccctctgaaccccagcaccaacagaaccatcagagccagcctggaatttcaagagttccgcatcctggacagcgtggccaatctgagagtgcggatcggcagcagagccaagagggaactgacagaggccgagtatgatgccgccgtggaattcctgatggactacgccgacaaagagcagcctagctgggccgatgtggccgagaaaattggcgtgcccggcaacagactggtggcccctgttctggaagatgtgcagcagaaaacagccccttacgacagaagcagcgccgcctttgagaaggccatgggcaagaaaaccgaggccagacagtggtgggagtccaccgatgatgaccagctgagaagcctgctgattgccttcctggtggacgccaccaacgacacagaagaagccgctgctgaagccggcctgagcgagctgtataagtcttggcctgccgaggaaagagaggccctgtccaacatcgacttcgagaagggcagagtggcctacagccaagaaaccctgagcaagctgagcgagtacatgcacgagtacagagtgggactgcacgaggctagaaaggccgtgttcggagtggatgatacctggcggcctcctctggataagctggaagaacctacaggacagcctgccgtggacagagtgctgaccatcctgagaagattcgtgctggactgcgagcggcaatggggcagacctagagccatcaccgtggaacacacacggacaggcctgatgggcccaacacagagacagaagatcctgaacgagcagaagaagaaccgggccgacaacgagagaatccgggatgagctgagagaatctggcgtggacaacccctccagagccgaagttcggagacacctgatcgtgcaagagcaagagtgccagtgcctgtactgcggcaccatgatcaccaccaccacaagcgagctggaccacatcgttcctagagccggtggcggcagcagcagaagggaaaatctggccgctgtgtgcagagcctgcaacgccaagaagaaacgcgagctgttctacgcctgggctggcccagtgaagtcccaagagacaatcgagagagtcagacagctgaaggcctttaaggacagcaagaaagccaagatgttcaagaaccagatccgccggctgaaccagaccgaggccgatgagcctatcgacgaaagaagcctggccagcacatcttacgccgctgtggccgttagagagcggctggaacagcacttcaacgaaggcctggcactggacgacaagtccagagtggtgctggatgtgtatgccggcgctgtgaccagagagtctcgtagagctggcggcatcgacgagcggattctgctgagaggcgagcgggacaagaacagattcgatgtgcggcatcacgccgtggacgctgctgttatgaccctgctgaacagatccgtggctctgaccctggaacagagatcacagctgaggcgggccttctacgagctggaactggacaaactggaccgggaccagctcaagcctggcgaggattggagaaacttcaccggcctgtacgaggcctctcagaacaagttcagcgagtggaagaaagccgccacagtgctgggagatctgctggctgaagccatcgaggatgacgccattgccgtggtgtctccactgagactgaggccccagaatggcagcgtgcacgacgataccatcaacgccgtgaagaagctgacactgggctctgcctggcctgcagacgctgtgaagagaatcgtggaccccgagatctacctggctatgaaggacgtgctgggcaagctgaaagagctgcccgaggattctgccagatctctggaactgtccgacggccggtacatcgaagccgatgacgaggtgctgttcttcccaaagaaggccgctagcatcctgacacctagaggcgccgctgagatcggcaactctatccaccatgccagactgtatagctggctgaccaagaagggcgagctgaagtttggcatgctgagagtgtacggcgccgagtttccctggctgatgagagagtctggaagccgcgacgtgctgcatatgcctattcaccctggcagccagagcttcagaggcatgcaggatggcgtgcggaaagccgtggaaagcggagaggctgtggaattcggctggatcacccaggacgatgagctggaattcgaccccgaggactacattgcccacggcggagatgacgaactgaacagactgctgcgagtgatgcccgagagaaggtggcgagtggacggcttctataacgccggcacactgagaatcagacccgctctgctgtctgctgagcagctgccttctgagctgcagaaaaaggtggccgacaagaccctgagcgacgtggaactgatcctgctgagggctgttcagcggggactgttcgtggccatcagcagctttctgcccctggaaagcctgaaagtgatccggcggaacaatctgggcttccccaggtggcgcggaaacggaaatctgcccaccagctttgaagtgcggagcagcgctctgagagccctgggagttgaaggatctggcggaaaaagacctgccgccacaaagaaagccggacaggccaagaaaaagaagtgaccacacccccattcccccactccagatagaacttcagttatatctcacgtgtctggagttggatccatgcatgc

SEQ ID NO: 604 - protein, 1166 aa, synthetic construct
  REGION 1..1166: note = Category: MG3-6/3-4 cassette coding sequence
  REGION 1..1166: note = Description: Protein sequence of MG3-6/3-4cassette coding sequence (includes NLS)
MAPKKKRKVGGGGSSTDMKNYRIGVDVGDRSVGLAAIEFDDDGLPIQKLALVTFRHDGGLDPTKNKTPMSRKETRGIARRTMRMNRERKRRLRNLDNVLENLGYSVPEGPEPETYEAWTSRALLASIKLASADELNEHLVRAVRHMARHRGWANPWWSLDQLEKASQEPSETFEIILARARELFGEKVPANPTLGMLGALAANNEVLLRPRDEKKRKTGYVRGTPLMFAQVRQGDQLAELRRICEVQGIEDQYEALRLGVFDHKHPYVPKERVGKDPLNPSTNRTIRASLEFQEFRILDSVANLRVRIGSRAKRELTEAEYDAAVEFLMDYADKEQPSWADVAEKIGVPGNRLVAPVLEDVQQKTAPYDRSSAAFEKAMGKKTEARQWWESTDDDQLRSLLIAFLVDATNDTEEAAAEAGLSELYKSWPAEEREALSNIDFEKGRVAYSQETLSKLSEYMHEYRVGLHEARKAVFGVDDTWRPPLDKLEEPTGQPAVDRVLTILRRFVLDCERQWGRPRAITVEHTRTGLMGPTQRQKILNEQKKNRADNERIRDELRESGVDNPSRAEVRRHLIVQEQECQCLYCGTMITTTTSELDHIVPRAGGGSSRRENLAAVCRACNAKKKRELFYAWAGPVKSQETIERVRQLKAFKDSKKAKMFKNQIRRLNQTEADEPIDERSLASTSYAAVAVRERLEQHFNEGLALDDKSRVVLDVYAGAVTRESRRAGGIDERILLRGERDKNRFDVRHHAVDAAVMTLLNRSVALTLEQRSQLRRAFYELELDKLDRDQLKPGEDWRNFTGLYEASQNKFSEWKKAATVLGDLLAEAIEDDAIAVVSPLRLRPQNGSVHDDTINAVKKLTLGSAWPADAVKRIVDPEIYLAMKDVLGKLKELPEDSARSLELSDGRYIEADDEVLFFPKKAASILTPRGAAEIGNSIHHARLYSWLTKKGELKFGMLRVYGAEFPWLMRESGSRDVLHMPIHPGSQSFRGMQDGVRKAVESGEAVEFGWITQDDELEFDPEDYIAHGGDDELNRLLRVMPERRWRVDGFYNAGTLRIRPALLSAEQLPSELQKKVADKTLSDVELILLRAVQRGLFVAISSFLPLESLKVIRRNNLGFPRWRGNGNLPTSFEVRSSALRALGVEGSGGKRPAATKKAGQAKKKK

SEQ ID NO: 605 - RNA, 110 nt, synthetic construct
  misc_feature 1..110: note = Category: MG3-6/3-4 sgRNA targeting mouse HAO-1
  misc_feature 1..110: note = Description: mH364-7-1
  source 1..110: mol_type = other RNA
gagctggccactgtgcgaggtagttgagaatcgaaagattcttaataaggcatccttccgatgctgacttctcaccgtccgttttccaataggagcgggcggtatgtttt

SEQ ID NO: 606 - RNA, 110 nt, synthetic construct
  misc_feature 1..110: note = Category: MG3-6/3-4 sgRNA targeting mouse HAO-1
  misc_feature 1..110: note = Description: mH364-20-1
  source 1..110: mol_type = other RNA
ttcagcaagtccactgttgtctgttgagaatcgaaagattcttaataaggcatccttccgatgctgacttctcaccgtccgttttccaataggagcgggcggtatgtttt

SEQ ID NO: 607 - RNA, 110 nt, synthetic construct; identical to SEQ ID NO: 605
  misc_feature 1..110: note = Category: MG3-6/3-4 sgRNA targeting mouse HAO-1
  misc_feature 1..110: note = Description: mH364-7-35
  source 1..110: mol_type = other RNA

SEQ ID NO: 608 - RNA, 110 nt, synthetic construct; identical to SEQ ID NO: 606
  misc_feature 1..110: note = Category: MG3-6/3-4 sgRNA targeting mouse HAO-1
  misc_feature 1..110: note = Description: mH364-20-35
  source 1..110: mol_type = other RNA

SEQ ID NO: 609 - RNA, 110 nt, synthetic construct; identical to SEQ ID NO: 605
  misc_feature 1..110: note = Category: MG3-6/3-4 sgRNA targeting mouse HAO-1
  misc_feature 1..110: note = Description: mH364-7-42
  source 1..110: mol_type = other RNA

SEQ ID NO: 610 - RNA, 110 nt, synthetic construct; identical to SEQ ID NO: 605
  misc_feature 1..110: note = Category: MG3-6/3-4 sgRNA targeting mouse HAO-1
  misc_feature 1..110: note = Description: mH364-7-45
  source 1..110: mol_type = other RNA

SEQ ID NO: 611 - RNA, 22 nt, synthetic construct
  source 1..22: mol_type = other RNA
gtatgactattacaggtctggg

SEQ ID NO: 612 - RNA, 22 nt, synthetic construct
  source 1..22: mol_type = other RNA
aaatagcaaagtttcttaccta

SEQ ID NO: 613 - RNA, 22 nt, synthetic construct
  source 1..22: mol_type = other RNA
taaatagcaaagtttcttacct

SEQ ID NO: 614 - RNA, 22 nt, synthetic construct
  source 1..22: mol_type = other RNA
attggcatgctgactctctgtc

SEQ ID NO: 615 - RNA, 22 nt, synthetic construct
  source 1..22: mol_type = other RNA
gagctggccactgtgcgaggta

SEQ ID NO: 616 - RNA, 22 nt, synthetic construct
  source 1..22: mol_type = other RNA
caggtaaggggtgtccacagtc

SEQ ID NO: 617 - RNA, 22 nt, synthetic construct
  source 1..22: mol_type = other RNA
attctatgtatctattctagga

SEQ ID NO: 618 - RNA, 22 nt, synthetic construct
  source 1..22: mol_type = other RNA
ttctatgtatctattctaggat

SEQ ID NO: 619 - RNA, 22 nt, synthetic construct
  source 1..22: mol_type = other RNA
aaatttcccttaggagaaaatg

SEQ ID NO: 620 - RNA, 22 nt, synthetic construct
  source 1..22: mol_type = other RNA
gtctccaaaatttcccttagga

SEQ ID NO: 621 - RNA, 22 nt, synthetic construct
  source 1..22: mol_type = other RNA
tgtctccaaaatttcccttagg

SEQ ID NO: 622 - RNA, 22 nt, synthetic construct
  source 1..22: mol_type = other RNA
tgatttggcattttctcctaag

SEQ ID NO: 623 - RNA, 22 nt, synthetic construct
  source 1..22: mol_type = other RNA
tcagcaagtccactgttgtctc

SEQ ID NO: 624 - RNA, 22 nt, synthetic construct
  source 1..22: mol_type = other RNA
ttcagcaagtccactgttgtct

SEQ ID NO: 625 - RNA, 22 nt, synthetic construct
  source 1..22: mol_type = other RNA
agtagagaaatgacaaacctct

SEQ ID NO: 626 - RNA, 22 nt, synthetic construct
  source 1..22: mol_type = other RNA
aagtagagaaatgacaaacctc

SEQ ID NO: 627 - RNA, 22 nt, synthetic construct
  source 1..22: mol_type = other RNA
acatccaagcattttctaggta

SEQ ID NO: 628 - RNA, 22 nt, synthetic construct
  source 1..22: mol_type = other RNA
ttggcatgctgactctctgtcc

SEQ ID NO: 629 - RNA, 22 nt, synthetic construct
  source 1..22: mol_type = other RNA
cgctggatgcaactgtacatct

SEQ ID NO: 630 - RNA, 22 nt, synthetic construct
  source 1..22: mol_type = other RNA
tctatgtatctattctaggatg

SEQ ID NO: 631 - RNA, 22 nt, synthetic construct
  source 1..22: mol_type = other RNA
tctattctaggatgaaaaactt

SEQ ID NO: 632 - RNA, 22 nt, synthetic construct
  source 1..22: mol_type = other RNA
agaaaatgccaaatcattggtt

SEQ ID NO: 633 - RNA, 22 nt, synthetic construct
  source 1..22: mol_type = other RNA
attgacatcactgcctattgtt

SEQ ID NO: 634 - DNA, 20 bp, synthetic construct
  source 1..20: mol_type = other DNA
gtgaccaaccctacccgttt

SEQ ID NO: 635 - DNA, 20 bp, synthetic construct
  source 1..20: mol_type = other DNA
gcaagcacctactgtctcgt

SEQ ID NO: 636 - DNA, 24 bp, synthetic construct
  source 1..24: mol_type = other DNA
gtctaggcatacaatgtttgctca

SEQ ID NO: 637 - DNA, 20 bp, synthetic construct
  source 1..20: mol_type = other DNA
caacgaaggttccctccagg

SEQ ID NO: 638 - DNA, 20 bp, synthetic construct
  source 1..20: mol_type = other DNA
ggaagggtgttcgagaagga

SEQ ID NO: 639 - DNA, 23 bp, synthetic construct
  source 1..23: mol_type = other DNA
ctatgcaaggaaaagatttggcc

SEQ ID NO: 640 - DNA, 20 bp, synthetic construct
  source 1..20: mol_type = other DNA
tgccctagacaagctgacac

SEQ ID NO: 641 - DNA, 20 bp, synthetic construct
  source 1..20: mol_type = other DNA
cagattctggaagtggccca

SEQ ID NO: 642 - DNA, 20 bp, synthetic construct
  source 1..20: mol_type = other DNA
tgccctagacaagctgacac

SEQ ID NO: 643 - DNA, 21 bp, synthetic construct
  source 1..21: mol_type = other DNA
ggctggctgaaaatagcatcc

SEQ ID NO: 644 - DNA, 20 bp, synthetic construct
  source 1..20: mol_type = other DNA
aggtttggttcccctcacct

SEQ ID NO: 645 - DNA, 22 bp, synthetic construct
  source 1..22: mol_type = other DNA
tctgccatgaaggcatatggac

SEQ ID NO: 646 - RNA, 109 nt, synthetic construct
  source 1..109: mol_type = other RNA
cttaggtcagtgaagagaagaagttgagaatcgaaagattcttaataaggcatccttccgatgctgacttctcaccgtccgttttccaataggagcgggcggtatgttt

SEQ ID NO: 647 - RNA, 110 nt, synthetic construct; identical to SEQ ID NO: 70
  source 1..110: mol_type = other RNA
  modified_base 1..3: mod_base = OTHER; note = 2'O-Methyl ribonucleotide
  modified_base 1..3: mod_base = OTHER; note = Phosphorothioate linkage
  modified_base 108..110: mod_base = OTHER; note = 2'O-Methyl ribonucleotide
  modified_base 107..109: mod_base = OTHER; note = Phosphorothioate linkage

SEQ ID NO: 648 - RNA, 110 nt, synthetic construct; identical to SEQ ID NO: 70
  source 1..110: mol_type = other RNA
  modified_base 1..3: mod_base = OTHER; note = 2'O-Methyl ribonucleotide
  modified_base 1..3: mod_base = OTHER; note = Phosphorothioate linkage
  modified_base 105..110: mod_base = OTHER; note = 2'O-Methyl ribonucleotide
  modified_base 104..109: mod_base = OTHER; note = Phosphorothioate linkage

SEQ ID NO: 649 - RNA, 110 nt, synthetic construct; identical to SEQ ID NO: 70
  source 1..110: mol_type = other RNA
  modified_base 1..3: mod_base = OTHER; note = 2'O-Methyl ribonucleotide
  modified_base 1..3: mod_base = OTHER; note = Phosphorothioate linkage
  modified_base 29..40: mod_base = OTHER; note = 2'O-Methyl ribonucleotide
  modified_base 108..110: mod_base = OTHER; note = 2'O-Methyl ribonucleotide
  modified_base 107..109: mod_base = OTHER; note = Phosphorothioate linkage

SEQ ID NO: 650 - RNA, 110 nt, synthetic construct; identical to SEQ ID NO: 70
  source 1..110: mol_type = other RNA
  modified_base 1..3: mod_base = OTHER; note = 2'O-Methyl ribonucleotide
  modified_base 1..3: mod_base = OTHER; note = Phosphorothioate linkage
  modified_base 28..39: mod_base = OTHER; note = 2'O-Methyl ribonucleotide
  modified_base 28..40: mod_base = OTHER; note = Phosphorothioate linkage
  modified_base 108..110: mod_base = OTHER; note = 2'O-Methyl ribonucleotide
  modified_base 107..109: mod_base = OTHER; note = Phosphorothioate linkage

SEQ ID NO: 651 - RNA, 110 nt, synthetic construct; identical to SEQ ID NO: 70
  source 1..110: mol_type = other RNA
  modified_base 1..3: mod_base = OTHER; note = 2'O-Methyl ribonucleotide
  modified_base 1..3: mod_base = OTHER; note = Phosphorothioate linkage
  modified_base 23..45: mod_base = OTHER; note = 2'O-Methyl ribonucleotide
  modified_base 108..110: mod_base = OTHER; note = 2'O-Methyl ribonucleotide
  modified_base 107..109: mod_base = OTHER; note = Phosphorothioate linkage

SEQ ID NO: 652 - RNA, 110 nt, synthetic construct; identical to SEQ ID NO: 70
  source 1..110: mol_type = other RNA
  modified_base 1..3: mod_base = OTHER; note = 2'O-Methyl ribonucleotide
  modified_base 1..3: mod_base = OTHER; note = Phosphorothioate linkage
  modified_base 23..32: mod_base = OTHER; note = 2'O-Methyl ribonucleotide
  modified_base 33..36: mod_base = OTHER; note = Phosphorothioate linkage
  modified_base 37..45: mod_base = OTHER; note = 2'O-Methyl ribonucleotide
  modified_base 108..110: mod_base = OTHER; note = 2'O-Methyl ribonucleotide
  modified_base 107..109: mod_base = OTHER; note = Phosphorothioate linkage

SEQ ID NO: 653 - RNA, 110 nt, synthetic construct; identical to SEQ ID NO: 70
  source 1..110: mol_type = other RNA
  modified_base 1..3: mod_base = OTHER; note = 2'O-Methyl ribonucleotide
  modified_base 1..3: mod_base = OTHER; note = Phosphorothioate linkage
  modified_base 49..54: mod_base = OTHER; note = 2'O-Methyl ribonucleotide
  modified_base 108..110: mod_base = OTHER; note = 2'O-Methyl ribonucleotide
  modified_base 107..109: mod_base = OTHER; note = Phosphorothioate linkage

SEQ ID NO: 654 - RNA, 110 nt, synthetic construct; identical to SEQ ID NO: 70
  source 1..110: mol_type = other RNA
  modified_base 1..3: mod_base = OTHER; note = 2'O-Methyl ribonucleotide
  modified_base 1..3: mod_base = OTHER; note = Phosphorothioate linkage
  modified_base 49..54: mod_base = OTHER; note = 2'O-Methyl ribonucleotide
  modified_base 55..59: mod_base = OTHER; note = Phosphorothioate linkage
  modified_base 108..110: mod_base = OTHER; note = 2'O-Methyl ribonucleotide
  modified_base 107..109: mod_base = OTHER; note = Phosphorothioate linkage

SEQ ID NO: 655 - RNA, 110 nt, synthetic construct; identical to SEQ ID NO: 70
  source 1..110: mol_type = other RNA
  modified_base 1..3: mod_base = OTHER; note = 2'O-Methyl ribonucleotide
  modified_base 1..3: mod_base = OTHER; note = Phosphorothioate linkage
  modified_base 33..36: mod_base = OTHER; note = 2'O-Methyl ribonucleotide
  modified_base 55..59: mod_base = OTHER; note = 2'O-Methyl ribonucleotide
  modified_base 88..91: mod_base = OTHER; note = 2'O-Methyl ribonucleotide
  modified_base 108..110: mod_base = OTHER; note = 2'O-Methyl ribonucleotide
  modified_base 107..109: mod_base = OTHER; note = Phosphorothioate linkage

SEQ ID NO: 656 - RNA, 110 nt, synthetic construct; identical to SEQ ID NO: 70
  source 1..110: mol_type = other RNA
  modified_base 1..3: mod_base = OTHER; note = 2'O-Methyl ribonucleotide
  modified_base 1..3: mod_base = OTHER; note = Phosphorothioate linkage
  modified_base 33..36: mod_base = OTHER; note = Phosphorothioate linkage
  modified_base 55..59: mod_base = OTHER; note = Phosphorothioate linkage
  modified_base 88..91: mod_base = OTHER; note = Phosphorothioate linkage
  modified_base 108..110: mod_base = OTHER; note = 2'O-Methyl ribonucleotide
  modified_base 107..109: mod_base = OTHER; note = Phosphorothioate linkage

SEQ ID NO: 657 - RNA, 110 nt, synthetic construct; identical to SEQ ID NO: 70
  source 1..110: mol_type = other RNA
  modified_base 1..3: mod_base = OTHER; note = 2'O-Methyl ribonucleotide
  modified_base 1..3: mod_base = OTHER; note = Phosphorothioate linkage
  modified_base 73..90: mod_base = OTHER; note = Phosphorothioate linkage
  modified_base 74..91: mod_base = OTHER; note = 2'O-Methyl ribonucleotide
  modified_base 104..109: mod_base = OTHER; note = Phosphorothioate linkage
  modified_base 105..110: mod_base = OTHER; note = 2'O-Methyl ribonucleotide

SEQ ID NO: 658 - RNA, 110 nt, synthetic construct; identical to SEQ ID NO: 70
  source 1..110: mol_type = other RNA
  modified_base 1..3: mod_base = OTHER; note = 2'O-Methyl ribonucleotide
  modified_base 1..3: mod_base = OTHER; note = Phosphorothioate linkage
  modified_base 23..32: mod_base = OTHER; note = 2'O-Methyl ribonucleotide
  modified_base 33..36: mod_base = OTHER; note = Phosphorothioate linkage
  modified_base 74..110: mod_base = OTHER; note = 2'O-Methyl ribonucleotide
  modified_base 73..109: mod_base = OTHER; note = Phosphorothioate linkage

SEQ ID NO: 659 - RNA, 110 nt, synthetic construct; identical to SEQ ID NO: 70
  source 1..110: mol_type = other RNA
  modified_base 1..3: mod_base = OTHER; note = 2'O-Methyl ribonucleotide
  modified_base 1..3: mod_base = OTHER; note = Phosphorothioate linkage
  modified_base 23..45: mod_base = OTHER; note = 2'O-Methyl ribonucleotide
  modified_base 108..110: mod_base = OTHER; note = 2'O-Methyl ribonucleotide
  modified_base 107..109: mod_base = OTHER; note = Phosphorothioate linkage

SEQ ID NO: 660-669 - skipped (10 entries)

SEQ ID NO: 670 - RNA, 110 nt, synthetic construct; identical to SEQ ID NO: 70
  source 1..110: mol_type = other RNA
  modified_base 1..3: mod_base = OTHER; note = 2'O-Methyl ribonucleotide
  modified_base 1..3: mod_base = OTHER; note = Phosphorothioate linkage
  modified_base 29..40: mod_base = OTHER; note = 2'O-Methyl ribonucleotide
  modified_base 74..110: mod_base = OTHER; note = 2'O-Methyl ribonucleotide
  modified_base 73..109: mod_base = OTHER; note = Phosphorothioate linkage

SEQ ID NO: 671 - RNA, 110 nt, synthetic construct; identical to SEQ ID NO: 70
  source 1..110: mol_type = other RNA
  modified_base 1..3: mod_base = OTHER; note = 2'O-Methyl ribonucleotide
  modified_base 1..3: mod_base = OTHER; note = Phosphorothioate linkage
  modified_base 29..40: mod_base = OTHER; note = 2'O-Methyl ribonucleotide
  modified_base 72..110: mod_base = OTHER; note = 2'O-Methyl ribonucleotide
  modified_base 107..109: mod_base = OTHER; note = Phosphorothioate linkage

SEQ ID NO: 672 - RNA, 110 nt, synthetic construct; identical to SEQ ID NO: 70
  source 1..110: mol_type = other RNA
  modified_base 1..3: mod_base = OTHER; note = 2'O-Methyl ribonucleotide
  modified_base 1..3: mod_base = OTHER; note = Phosphorothioate linkage
  modified_base 33..36: mod_base = OTHER; note = 2'O-Methyl ribonucleotide
  modified_base 32..35: mod_base = OTHER; note = Phosphorothioate linkage
  modified_base 46..48: mod_base = OTHER; note = 2'O-Methyl ribonucleotide
  modified_base 45..47: mod_base = OTHER; note = Phosphorothioate linkage
  modified_base 55..59: mod_base = OTHER; note = 2'O-Methyl ribonucleotide
  modified_base 54..58: mod_base = OTHER; note = Phosphorothioate linkage
  modified_base 66..73: mod_base = OTHER; note = 2'O-Methyl ribonucleotide
  modified_base 65..72: mod_base = OTHER; note = Phosphorothioate linkage
  modified_base 88..91: mod_base = OTHER; note = 2'O-Methyl ribonucleotide
  modified_base 87..90: mod_base = OTHER; note = Phosphorothioate linkage
  modified_base 105..110: mod_base = OTHER; note = 2'O-Methyl ribonucleotide
  modified_base 104..109: mod_base = OTHER; note = Phosphorothioate linkage

SEQ ID NO: 673 - RNA, 110 nt, synthetic construct; identical to SEQ ID NO: 70
  source 1..110: mol_type = other RNA
  modified_base 1..3: mod_base = OTHER; note = 2'O-Methyl ribonucleotide
  modified_base 1..3: mod_base = OTHER; note = Phosphorothioate linkage
  modified_base 4..17: mod_base = OTHER; note = 2'Fluoro ribonucleotide
  modified_base 108..110: mod_base = OTHER; note = 2'O-Methyl ribonucleotide
  modified_base 107..109: mod_base = OTHER; note = Phosphorothioate linkage

SEQ ID NO: 674 - RNA, 110 nt, synthetic construct; identical to SEQ ID NO: 70
  source 1..110: mol_type = other RNA
  modified_base 1..3: mod_base = OTHER; note = 2'O-Methyl ribonucleotide
  modified_base 1..3: mod_base = OTHER; note = Phosphorothioate linkage
  modified_base 33..36: mod_base = OTHER; note = Phosphorothioate linkage
  modified_base 55..59: mod_base = OTHER; note = Phosphorothioate linkage
  modified_base 74..87: mod_base = OTHER; note = 2'O-Methyl ribonucleotide
  modified_base 88..91: mod_base = OTHER; note = Phosphorothioate linkage
  modified_base 92..110: mod_base = OTHER; note = 2'O-Methyl ribonucleotide
  modified_base 103..109: mod_base = OTHER; note = Phosphorothioate linkage

SEQ ID NO: 675 - RNA, 110 nt, synthetic construct; identical to SEQ ID NO: 70
  source 1..110: mol_type = other RNA
  modified_base 1..3: mod_base = OTHER; note = 2'O-Methyl ribonucleotide
  modified_base 1..3: mod_base = OTHER; note = Phosphorothioate linkage
  modified_base 33..36: mod_base = OTHER; note = Phosphorothioate linkage
  modified_base 55..59: mod_base = OTHER; note = Phosphorothioate linkage
  modified_base 66..73: mod_base = OTHER; note = Phosphorothioate linkage
  modified_base 74..87: mod_base = OTHER; note = 2'O-Methyl ribonucleotide
  modified_base 88..91: mod_base = OTHER; note = Phosphorothioate linkage
  modified_base 92..110: mod_base = OTHER; note = 2'O-Methyl ribonucleotide
  modified_base 103..109: mod_base = OTHER; note = Phosphorothioate linkage

SEQ ID NO: 676 - RNA, 110 nt, synthetic construct; identical to SEQ ID NO: 70
  source 1..110: mol_type = other RNA
  modified_base 1..3: mod_base = OTHER; note = 2'O-Methyl ribonucleotide
  modified_base 1..3: mod_base = OTHER; note = Phosphorothioate linkage
  modified_base 33..36: mod_base = OTHER; note = Phosphorothioate linkage
  modified_base 49..54: mod_base = OTHER; note = 2'O-Methyl ribonucleotide
  modified_base 55..59: mod_base = OTHER; note = Phosphorothioate linkage
  modified_base 74..87: mod_base = OTHER; note = 2'O-Methyl ribonucleotide
  modified_base 88..91: mod_base = OTHER; note = Phosphorothioate linkage
  modified_base 92..110: mod_base = OTHER; note = 2'O-Methyl ribonucleotide
  modified_base 103..109: mod_base = OTHER; note = Phosphorothioate linkage

SEQ ID NO: 677 - RNA, 110 nt, synthetic construct; identical to SEQ ID NO: 70
  source 1..110: mol_type = other RNA
  modified_base 1..3: mod_base = OTHER; note = 2'O-Methyl ribonucleotide
  modified_base 1..3: mod_base = OTHER; note = Phosphorothioate linkage
  modified_base 33..36: mod_base = OTHER; note = Phosphorothioate linkage
  modified_base 49..54: mod_base = OTHER; note = 2'O-Methyl ribonucleotide
  modified_base 55..59: mod_base = OTHER; note = Phosphorothioate linkage
  modified_base 66..73: mod_base = OTHER; note = Phosphorothioate linkage
  modified_base 74..87: mod_base = OTHER; note = 2'O-Methyl ribonucleotide
  modified_base 88..91: mod_base = OTHER; note = Phosphorothioate linkage
  modified_base 92..110: mod_base = OTHER; note = 2'O-Methyl ribonucleotide
  modified_base 103..109: mod_base = OTHER; note = Phosphorothioate linkage

SEQ ID NO: 678 - RNA, 110 nt, synthetic construct; identical to SEQ ID NO: 70
  source 1..110: mol_type = other RNA
  modified_base 1..4: mod_base = OTHER; note = 2'O-Methyl ribonucleotide
  modified_base 1..4: mod_base = OTHER; note = Phosphorothioate linkage
  modified_base 55..59: mod_base = OTHER; note = Phosphorothioate linkage
  modified_base 105..110: mod_base = OTHER; note = 2'O-Methyl ribonucleotide
  modified_base 104..109: mod_base = OTHER; note = Phosphorothioate linkage

SEQ ID NO: 679 - RNA, 110 nt, synthetic construct; identical to SEQ ID NO: 70
  source 1..110: mol_type = other RNA
  modified_base 1..4: mod_base = OTHER; note = 2'O-Methyl ribonucleotide
  modified_base 1..4: mod_base = OTHER; note = Phosphorothioate linkage
  modified_base 33..36: mod_base = OTHER; note = Phosphorothioate linkage
  modified_base 74..87: mod_base = OTHER; note = 2'O-Methyl ribonucleotide
  modified_base 88..91: mod_base = OTHER; note = Phosphorothioate linkage
  modified_base 105..110: mod_base = OTHER; note = 2'O-Methyl ribonucleotide
  modified_base 104..109: mod_base = OTHER; note = Phosphorothioate linkage

SEQ ID NO: 680 - RNA, 110 nt, synthetic construct; identical to SEQ ID NO: 70
  source 1..110: mol_type = other RNA
  modified_base 1: mod_base = OTHER; note = 2'O-Methyl ribonucleotide
  modified_base 2..4: mod_base = OTHER; note = 2'Fluoro ribonucleotide
  modified_base 1..4: mod_base = OTHER; note = Phosphorothioate linkage
  modified_base 23..32: mod_base = OTHER; note = 2'O-Methyl ribonucleotide
  modified_base 104..109: mod_base = OTHER; note = Phosphorothioate linkage
  modified_base 105..110: mod_base = OTHER; note = 2'O-Methyl ribonucleotide

SEQ ID NO: 681 - RNA, 110 nt, synthetic construct; identical to SEQ ID NO: 70
  source 1..110: mol_type = other RNA
  modified_base 1: mod_base = OTHER; note = 2'O-Methyl ribonucleotide
  modified_base 2..4: mod_base = OTHER; note = 2'Fluoro ribonucleotide
  modified_base 1..4: mod_base = OTHER; note = Phosphorothioate linkage
  modified_base 49..54: mod_base = OTHER; note = 2'O-Methyl ribonucleotide
  modified_base 104..109: mod_base = OTHER; note = Phosphorothioate linkage
  modified_base 105..110: mod_base = OTHER; note = 2'O-Methyl ribonucleotide

SEQ ID NO: 682 - RNA, 110 nt, synthetic construct; identical to SEQ ID NO: 70
  source 1..110: mol_type = other RNA
  modified_base 1: mod_base = OTHER; note = 2'O-Methyl ribonucleotide
  modified_base 2..4: mod_base = OTHER; note = 2'Fluoro ribonucleotide
  modified_base 1..4: mod_base = OTHER; note = Phosphorothioate linkage
  modified_base 74..87: mod_base = OTHER; note = 2'O-Methyl ribonucleotide
  modified_base 104..109: mod_base = OTHER; note = Phosphorothioate linkage
  modified_base 105..110: mod_base = OTHER; note = 2'O-Methyl ribonucleotide

SEQ ID NO: 683 - RNA, 110 nt, synthetic construct; identical to SEQ ID NO: 70
  source 1..110: mol_type = other RNA
  modified_base 1..3: mod_base = OTHER; note = 2'O-Methyl ribonucleotide
  modified_base 4..17: mod_base = OTHER; note = 2'Fluoro ribonucleotide
  modified_base 23..32: mod_base = OTHER; note = 2'O-Methyl ribonucleotide
  modified_base 33..36: mod_base = OTHER; note = Phosphorothioate linkage
  modified_base 37..40: mod_base = OTHER; note = 2'O-Methyl ribonucleotide
  modified_base 49..54: mod_base = OTHER; note = 2'O-Methyl ribonucleotide
  modified_base 55..59: mod_base = OTHER; note = Phosphorothioate linkage
  modified_base 74..87: mod_base = OTHER; note = 2'O-Methyl ribonucleotide
  modified_base 88..91: mod_base = OTHER; note = Phosphorothioate linkage
  modified_base 92..110: mod_base = OTHER; note = 2'O-Methyl ribonucleotide
  modified_base 104..109: mod_base = OTHER; note = Phosphorothioate linkage

SEQ ID NO: 684 - RNA, 110 nt, synthetic construct; identical to SEQ ID NO: 70
  source 1..110: mol_type = other RNA
  modified_base 1..3: mod_base = OTHER; note = 2'O-Methyl ribonucleotide
  modified_base 4..17: mod_base = OTHER; note = 2'Fluoro ribonucleotide
  modified_base 23..32: mod_base = OTHER; note = 2'O-Methyl ribonucleotide
  modified_base 33..36: mod_base = OTHER; note = Phosphorothioate linkage
  modified_base 37..40: mod_base = OTHER; note = 2'O-Methyl ribonucleotide
  modified_base 49..54: mod_base = OTHER; note = 2'O-Methyl ribonucleotide
  modified_base 55..59: mod_base = OTHER; note = Phosphorothioate linkage
  modified_base 88..91: mod_base = OTHER; note = Phosphorothioate linkage
  modified_base 104..109: mod_base = OTHER; note = Phosphorothioate linkage

SEQ ID NO: 685 - RNA, 110 nt, synthetic construct; identical to SEQ ID NO: 70
  source 1..110: mol_type = other RNA
  modified_base 1..4: mod_base = OTHER; note = 2'O-Methyl ribonucleotide
  modified_base 5..16: mod_base = OTHER; note = 2'Fluoro ribonucleotide
  modified_base 33..36: mod_base = OTHER; note = Phosphorothioate linkage
  modified_base 55..59: mod_base = OTHER; note = Phosphorothioate linkage
  modified_base 88..91: mod_base = OTHER; note = Phosphorothioate linkage
  modified_base 104..109: mod_base = OTHER; note = Phosphorothioate linkage
  modified_base 105..110: mod_base = OTHER; note = 2'O-Methyl ribonucleotide

SEQ ID NO: 686 - RNA, 110 nt, synthetic construct; identical to SEQ ID NO: 70
  source 1..110: mol_type = other RNA
  modified_base 1..4: mod_base = OTHER; note = 2'O-Methyl ribonucleotide
  modified_base 1..4: mod_base = OTHER; note = Phosphorothioate linkage
  modified_base 33..36: mod_base = OTHER; note = 2'O-Methyl ribonucleotide
  modified_base 33..36: mod_base = OTHER; note = Phosphorothioate linkage
  modified_base 55..59: mod_base = OTHER; note = 2'O-Methyl ribonucleotide
  modified_base 55..59: mod_base = OTHER; note = Phosphorothioate linkage
  modified_base 88..91: mod_base = OTHER; note = 2'O-Methyl ribonucleotide
  modified_base 88..91: mod_base = OTHER; note = Phosphorothioate linkage
  modified_base 105..110: mod_base = OTHER; note = 2'O-Methyl ribonucleotide
  modified_base 104..109: mod_base = OTHER; note = Phosphorothioate linkage

SEQ ID NO: 687 - RNA, 110 nt, synthetic construct; identical to SEQ ID NO: 70
  source 1..110: mol_type = other RNA
  modified_base 1..4: mod_base = OTHER; note = 2'O-Methyl ribonucleotide
  modified_base 1..4: mod_base = OTHER; note = Phosphorothioate linkage
  modified_base 23..32: mod_base = OTHER; note = 2'O-Methyl ribonucleotide
  modified_base 33..36: mod_base = OTHER; note = Phosphorothioate linkage
  modified_base 49..54: mod_base = OTHER; note = 2'O-Methyl ribonucleotide
  modified_base 55..59: mod_base = OTHER; note = Phosphorothioate linkage
  modified_base 88..91: mod_base = OTHER; note = Phosphorothioate linkage
  modified_base 105..110: mod_base = OTHER; note = 2'O-Methyl ribonucleotide
  modified_base 104..109: mod_base = OTHER; note = Phosphorothioate linkage

SEQ ID NO: 688 - RNA, 110 nt, synthetic construct; identical to SEQ ID NO: 70
  source 1..110: mol_type = other RNA
  modified_base 1..4: mod_base = OTHER; note = 2'O-Methyl ribonucleotide
  modified_base 1..4: mod_base = OTHER; note = Phosphorothioate linkage
  modified_base 23..32: mod_base = OTHER; note = 2'O-Methyl ribonucleotide
  modified_base 33..36: mod_base = OTHER; note = Phosphorothioate linkage
  modified_base 49..54: mod_base = OTHER; note = 2'O-Methyl ribonucleotide
  modified_base 55..59: mod_base = OTHER; note = Phosphorothioate linkage
  modified_base 74..87: mod_base = OTHER; note = 2'O-Methyl ribonucleotide
  modified_base 88..91: mod_base = OTHER; note = Phosphorothioate linkage
  modified_base 105..110: mod_base = OTHER; note = 2'O-Methyl ribonucleotide
  modified_base 104..109: mod_base = OTHER; note = Phosphorothioate linkage

SEQ ID NO: 689 - RNA, 110 nt, synthetic construct; identical to SEQ ID NO: 70
  source 1..110: mol_type = other RNA
  modified_base 1..4: mod_base = OTHER; note = 2'O-Methyl ribonucleotide
  modified_base 1..4: mod_base = OTHER; note = Phosphorothioate linkage
  modified_base 33..36: mod_base = OTHER; note = 2'O-Methyl ribonucleotide
  modified_base 33..36: mod_base = OTHER; note = Phosphorothioate linkage
  modified_base 55..59: mod_base = OTHER; note = 2'O-Methyl ribonucleotide
  modified_base 55..59: mod_base = OTHER; note = Phosphorothioate linkage
  modified_base 88..91: mod_base = OTHER; note = 2'O-Methyl ribonucleotide
  modified_base 88..91: mod_base = OTHER; note = Phosphorothioate linkage
  modified_base 105..110: mod_base = OTHER; note = 2'O-Methyl ribonucleotide
  modified_base 104..109: mod_base = OTHER; note = Phosphorothioate linkage

SEQ ID NO: 690 - RNA, 110 nt, synthetic construct; identical to SEQ ID NO: 70
  source 1..110: mol_type = other RNA
  modified_base 1..4: mod_base = OTHER; note = 2'O-Methyl ribonucleotide
  modified_base 1..4: mod_base = OTHER; note = Phosphorothioate linkage
  modified_base 29..32: mod_base = OTHER; note = 2'O-Methyl ribonucleotide
  modified_base 33..36: mod_base = OTHER; note = Phosphorothioate linkage
  modified_base 55..59: mod_base = OTHER; note = Phosphorothioate linkage
  modified_base 66..73: mod_base = OTHER; note = Phosphorothioate linkage
  modified_base 88..91: mod_base = OTHER; note = Phosphorothioate linkage
  modified_base 105..110: mod_base = OTHER; note = 2'O-Methyl ribonucleotide
  modified_base 104..109: mod_base = OTHER; note = Phosphorothioate linkage

SEQ ID NO: 691 - RNA, 110 nt, synthetic construct; identical to SEQ ID NO: 70
  source 1..110: mol_type = other RNA
  modified_base 1..4: mod_base = OTHER; note = 2'O-Methyl ribonucleotide
  modified_base 1..4: mod_base = OTHER; note = Phosphorothioate linkage
  modified_base 29..32: mod_base = OTHER; note = 2'O-Methyl ribonucleotide
  modified_base 33..36: mod_base = OTHER; note = Phosphorothioate linkage
  modified_base 37..40: mod_base = OTHER; note = 2'O-Methyl ribonucleotide
  modified_base 47..54: mod_base = OTHER; note = 2'O-Methyl ribonucleotide
  modified_base 55..59: mod_base = OTHER; note = Phosphorothioate linkage
  modified_base 60..64: mod_base = OTHER; note = 2'O-Methyl ribonucleotide
  modified_base 65..67: mod_base = OTHER; note = Phosphorothioate linkage
  modified_base 68..70: mod_base = OTHER; note = 2'O-Methyl ribonucleotide
  modified_base 88..91: mod_base = OTHER; note = Phosphorothioate linkage
  modified_base 105..110: mod_base = OTHER; note = 2'O-Methyl ribonucleotide
  modified_base 104..109: mod_base = OTHER; note = Phosphorothioate linkage

SEQ ID NO: 692 - RNA, 110 nt, synthetic construct; identical to SEQ ID NO: 70
  source 1..110: mol_type = other RNA
  modified_base 1..4: mod_base = OTHER; note = 2'O-Methyl ribonucleotide
  modified_base 1..4: mod_base = OTHER; note = Phosphorothioate linkage
  modified_base 29..32: mod_base = OTHER; note = 2'O-Methyl ribonucleotide
  modified_base 33..36: mod_base = OTHER; note = Phosphorothioate linkage
  modified_base 49..54: mod_base = OTHER; note = 2'O-Methyl ribonucleotide
  modified_base 55..59: mod_base = OTHER; note = Phosphorothioate linkage
  modified_base 74..87: mod_base = OTHER; note = 2'O-Methyl ribonucleotide
  modified_base 88..91: mod_base = OTHER; note = Phosphorothioate linkage
  modified_base 105..110: mod_base = OTHER; note = 2'O-Methyl ribonucleotide
  modified_base 104..109: mod_base = OTHER; note = Phosphorothioate linkage

SEQ ID NO: 693 - RNA, 110 nt, synthetic construct; identical to SEQ ID NO: 70
  source 1..110: mol_type = other RNA
  modified_base 1..4: mod_base = OTHER; note = 2'O-Methyl ribonucleotide
  modified_base 1..4: mod_base = OTHER; note = Phosphorothioate linkage
  modified_base 5..21: mod_base = OTHER; note = 2'Fluoro ribonucleotide
  modified_base 33..36: mod_base = OTHER; note = Phosphorothioate linkage
  modified_base 55..59: mod_base = OTHER; note = Phosphorothioate linkage
  modified_base 88..91: mod_base = OTHER; note = Phosphorothioate linkage
  modified_base 105..110: mod_base = OTHER; note = 2'O-Methyl ribonucleotide
  modified_base 104..109: mod_base = OTHER; note = Phosphorothioate linkage

SEQ ID NO: 694 - RNA, 110 nt, synthetic construct; identical to SEQ ID NO: 70
  source 1..110: mol_type = other RNA
  modified_base 1..3: mod_base = OTHER; note = 2'O-Methyl ribonucleotide
  modified_base 1..3: mod_base = OTHER; note = Phosphorothioate linkage
  modified_base 92..110: mod_base = OTHER; note = 2'O-Methyl ribonucleotide
  modified_base 104..109: mod_base = OTHER; note = Phosphorothioate linkage

SEQ ID NO: 695 - RNA, 110 nt, synthetic construct; identical to SEQ ID NO: 70
  source 1..110: mol_type = other RNA
  modified_base 1..3: mod_base = OTHER; note = 2'O-Methyl ribonucleotide
  modified_base 1..3: mod_base = OTHER; note = Phosphorothioate linkage
  modified_base 74..87: mod_base = OTHER; note = 2'O-Methyl ribonucleotide
  modified_base 105..110: mod_base = OTHER; note = 2'O-Methyl ribonucleotide
  modified_base 104..109: mod_base = OTHER; note = Phosphorothioate linkage

SEQ ID NO: 696 - protein, 742 aa, synthetic construct
  REGION 1..742: note = Category: MG3 chimeric effectors
  REGION 1..742: note = Description: MG3-6 N-terminal fragment (1-742)
MSTDMKNYRIGVDVGDRSVGLAAIEFDDDGLPIQKLALVTFRHDGGLDPTKNKTPMSRKETRGIARRTMRMNRERKRRLRNLDNVLENLGYSVPEGPEPETYEAWTSRALLASIKLASADELNEHLVRAVRHMARHRGWANPWWSLDQLEKASQEPSETFEIILARARELFGEKVPANPTLGMLGALAANNEVLLRPRDEKKRKTGYVRGTPLMFAQVRQGDQLAELRRICEVQGIEDQYEALRLGVFDHKHPYVPKERVGKDPLNPSTNRTIRASLEFQEFRILDSVANLRVRIGSRAKRELTEAEYDAAVEFLMDYADKEQPSWADVAEKIGVPGNRLVAPVLEDVQQKTAPYDRSSAAFEKAMGKKTEARQWWESTDDDQLRSLLIAFLVDATNDTEEAAAEAGLSELYKSWPAEEREALSNIDFEKGRVAYSQETLSKLSEYMHEYRVGLHEARKAVFGVDDTWRPPLDKLEEPTGQPAVDRVLTILRRFVLDCERQWGRPRAITVEHTRTGLMGPTQRQKILNEQKKNRADNERIRDELRESGVDNPSRAEVRRHLIVQEQECQCLYCGTMITTTTSELDHIVPRAGGGSSRRENLAAVCRACNAKKKRELFYAWAGPVKSQETIERVRQLKAFKDSKKAKMFKNQIRRLNQTEADEPIDERSLASTSYAAVAVRERLEQHFNEGLALDDKSRVVLDVYAGAVTRESRRAGGIDERILLRGERDKNRFDVRHHAVDA

SEQ ID NO: 697 - protein, 276 aa, synthetic construct
  REGION 1..276: note = Category: MG1 chimeric effector
  REGION 1..276: note = Description: MG1-4 C-terminal fragment
ICISFSRDFKYDKEIKKDIIKGFNPEIVKNAIDKIMPYPYANDKPFKGNTKPLETIYGLRTYGDKSYITQRVELNSIDKKATKIKSIIDETIKNDLLNKLKENPTEQEWKLMLQNYIHPKKQTKVKKVMISVSEGEITKDSNNRERMGEFVDFGTKGTQHQFKHSKRHKGQILYFNEKGVVEVMPVYSNIKTTDVKDKLQNMGCKLYNKGQMFYSGCLVDIPKPFKAGSKEYPAGRYQIKTIRSDKVAELEDACGNKISTNVKYLVPAEFKKVESK

SEQ ID NO: 698 - protein, 289 aa, synthetic construct
  REGION 1..289: note = Category: MG1 chimeric effector
  REGION 1..289: note = Description: MG1-5 C-terminal fragment
MCICFAPTSNAKKALSRKNILPEEIAKNPESDDARNFFAKYLAEVVPTKVAIKKPELEQTIYSKRVIGGRQTIVKKCNVRDLAYKGQNPKYDFDTLTKRIKDIINPVSKRVIEDFAKTEPTEAEWEDWCKYEAAIPSKNGSPTRLLRVLCKTKDDAERFKDLSKDGCGAYRKSKSHKGQFIWKDNKGNYLVAPVYIYSSKQKVYAELKNNPKCMGICDFFKTGCLVKISNEVVDEKKNRLWLKAGFYNLNSIAKEKRVYLTDVNGQEHKKIPLQHLMNAGMKRVETNTI

SEQ ID NO: 699 - protein, 287 aa, synthetic construct
  REGION 1..287: note = Category: MG1 chimeric effector
  REGION 1..287: note = Description: MG1-6 C-terminal fragment
MCLCFAPTGVDSRRAKLGEILPEKLRSEKAAREFFKSYLDKIMPVDVAPKKPRLEDGIYSKRIIGGKACMVKRNNLVDLAYKSGLKPVFDIPTLIKLVDKKEKGIINPQIRKMIGEFAATNPDESAWRKWCEEVRLPSKSGLGARVLRVLVYYGEADEYKDLSKDGCGAYRKGDGHKGQVVWESVDGKYYVEPVYVHASKAGVMAALNANPKKKRICGMFNSHCTVDVGDVYNDRGDFILPAGRYMVNTILTTGRCVLTNADGEKRNPININYLMRAGMRRVELSEL

SEQ ID NO: 700 - protein, 287 aa, synthetic construct
  REGION 1..287: note = Category: MG1 chimeric effector
  REGION 1..287: note = Description: MG1-7 C-terminal fragment
MCLCFAPTGVNSKRARVDMLLPPKIRSEKEAELFFRKYLDKLIPVDVAPKKPKLEDGIYSMRTVGGKKIMARRVNLVDLAYKSGLKPVYDVSVLIKLLDKKERGIINPQIRKLVADFARTNPSEDEWKKWCGECRLPSKNGLGTRVIRVLLNYGEPAEYKDLSKDGRGAFRRGDGHKGQIVWESTDGKYCVLPIYVHASKAKLLAELCANPKKKRICGIFTSHCMVKVGNTYNNKGELLLPEGVYMLNTIRTDGWIQLTSANGDKSKPININYLMKAGMKKVPVKDL

SEQ ID NO: 701 - protein, 326 aa, synthetic construct
  REGION 1..326: note = Category: MG2 chimeric effector
  REGION 1..326: note = Description: MG2-4 C-terminal fragment
LTLGLATALVPGIERKELRRALSLRQAKGDDATLLRSDPKLGEALRWRTEDRFEAAPLSGKLESAVRRALAEGRVVQHVPAKRQGMKVDSNFFGFVEFDETGRLRVRQKMRSPTTRRREIKTTVKNGKNLHTLSHLSLDPKSWLGAPDHPLRRKQLEHGLRTENDLANPKLGNIRGMLPIRENWGIALITKDGSPRLDVIPYINVHQWLEVLALENGGGSPVVLRKGHLVGFDAEKCPEEYCGAWMLLGVKDGRSGTTLELIRPWMVAPRKGGTKESSAKQAIKPASGYSEKEGKASGVFLQRSADVFLKLGLRPLDHDLTGIAAF

SEQ ID NO: 702 - protein, 264 aa, synthetic construct
  REGION 1..264: note = Category: MG2 chimeric effector
  REGION 1..264: note = Description: MG2-7 C-terminal fragment
VTQGLALLLFAPEDWPLLVKRNLPDSEQRHLKARYPFLDFSADKHISIQDLPEDTLHTISERLAECRVVRHIPAKMHGIIVDQTTWGTVAAGAITTLRQKTTEKNARCDENGKRFIKTTEKKRSLLLGGPDAPDGKLAKIKGAILVTENWGCALDPSPTVIPHFKVYPQLRALREKNGGRPIRILRKGSLIQVKAGTYQGIWSVASIKDNADGICLDINAADKVKLENRSDDSKINVRLDSLRKSGLKILKPKLTGACPTTSSP

SEQ ID NO: 703 - protein, 367 aa, synthetic construct
  REGION 1..367: note = Category: MG3 chimeric effector
  REGION 1..367: note = Description: MG3-1 C-terminal fragment
AVLTLQSPAIYRVLLTRVNLKHEHEVTGEAPEWRDYEGADQAEKVLYRRWQKNIATLAELMRQEIENNRVPVTRPIRLRKSRGAVHDATVMKALERDLWGEWDAQAIDRLVDPELHLALRKLFTSTKSKKIDVDATSQGLPERYLANQTVQLFDADAPSVMSPRGILRIGAGTHHARLLTWDDPKKGPQLGIQRVFAAEFGEILKDASSNDLFEAPIPFHTMSHRDLQPKVRAAVEQGLTRQIGWITQGDELEIDPADFVGEANAFGNFLREFPERSWSIAGLKKSNTIVIRPLLLSQEGVTAAISPHAAKIVENGIELSNSTLFTAPGTGIIRRTGLGRPRWDSGPAHLPESFNVHARMTQQSARD

SEQ ID NO: 704 - protein, 380 aa, synthetic construct
  REGION 1..380: note = Category: MG3 chimeric effector
  REGION 1..380: note = Description: MG3-2 C-terminal fragment
AVLTLLDPSVAKTLAMRLDLKREQQDSGRDTRWKEFKGLTPASQERFIKWCQASECLADMLRQQIEADRVPVVVPLRISPSNGAVHDDSVRPLTRQKIDSTWDRKSINRIVDPEIHVAMRRLLNNGTSLPEDKNRVLDLPDGNELGPHDEVELFSTSAASIKLRRGGSAEIGGSIHHARVYAWMGAKGQLEYGMMRVFGAEFPTLTKLSGSKDILRMPIHAGSMSYRDMQDRVRKPIESDIAVELGWITQGDELEILPEAHLETAGGLGDFLKSFPETQWTIDGFNDPSRLRVRPRLMSLEGRDTIDAMGHLSDTEKLKIKQALSKGLMVSASELLSHGAKIIRRDHLGRPRWRGNARPVSIELEQVANQLVNHRSVDGQ

SEQ ID NO: 705 - protein, 383 aa, synthetic construct
  REGION 1..383: note = Category: MG3 chimeric effector
  REGION 1..383: note = Description: MG3-3 C-terminal fragment
AVMTLLNPSVAVTLEQRRMLKQENDYSSPRGQHDNGWRDFIGRGEASQSKFLHWKKTAVVLADLISEAIEQDTIPVVNPLRLRPQNGSVHKDTVEAVLERTVGDSWTDKQVSRIVDPNTYIAFLSLLGRKKELDADHQRLVSVSAGVKLLADERVQIFPEEAASILTPRGVVKIGDSIHHARLYGWKNQRGDIQVGMLRVFGAEFPWFMRESGVKDILRVPIPQGSQSYRDLAATTRKFIENGQATEFGWITQNDEIEISAEEYLATDKGDILSDFLGILPEIRWKVTGIEDNRRIRLRPLLLSSEAIPNMLNGRLLTQEEHDLIALVINKGVRVVVSTFLALPSTKIIRRNNLGIPRWRGNGHLPTSLDIQRAATQALEGRD

SEQ ID NO: 706 - protein, 392 aa, synthetic construct
  REGION 1..392: note = Category: MG3 chimeric effector
  REGION 1..392: note = Description: MG3-4 C-terminal fragment
AVMTLLNRSVALTLEQRSQLRRAFYELELDKLDRDQLKPGEDWRNFTGLYEASQNKFSEWKKAATVLGDLLAEAIEDDAIAVVSPLRLRPQNGSVHDDTINAVKKLTLGSAWPADAVKRIVDPEIYLAMKDVLGKLKELPEDSARSLELSDGRYIEADDEVLFFPKKAASILTPRGAAEIGNSIHHARLYSWLTKKGELKFGMLRVYGAEFPWLMRESGSRDVLHMPIHPGSQSFRGMQDGVRKAVESGEAVEFGWITQDDELEFDPEDYIAHGGDDELNRLLRVMPERRWRVDGFYNAGTLRIRPALLSAEQLPSELQKKVADKTLSDVELILLRAVQRGLFVAISSFLPLESLKVIRRNNLGFPRWRGNGNLPTSFEVRSSALRALGVEG

SEQ ID NO: 707 - protein, 381 aa, synthetic construct
  REGION 1..381: note = Category: MG3 chimeric effector
  REGION 1..381: note = Description: MG3-7 C-terminal fragment
AVLTLLNRSVAVTLEQRRLIKQQREYSLEKSRRERDNVWRDFMGLGPAAQEKFAKWKKTAYVLADIIKEAISNDAIPVVSPLRLRPQNGSVHLDTVDAVLERTIGDAWTVDQVHRIVNPQIYLAFAGYLGNQKALDPDSSRVLALNDGRKLTAEDVIYVFPEKAASILTPRGVVKIGESVHHVRLYAWKNRKGKAEVGMLRVFGAEFPWLMRESGVKDVLRVPIHTGSQSYRDLSFTVRKNIEKGEAAEIGWLTQNEELEFNPESYLQEGGKDKLAKFLAFLPETRWRVDGFPMPDKLRIRPALLSREEIPEGVFRTEEQSLLEEALTKGLIIATKGLLSLPDVKVLRRNNLGIPRWRGGSYRPVSLDIQRAALAALDEQE

SEQ ID NO: 708 - protein, 392 aa, synthetic construct
  REGION 1..392: note = Category: MG3 chimeric effector
  REGION 1..392: note = Description: MG3-8 C-terminal fragment
AVMTLLNRSVALTLEQRSQLRRAFYEQGLDKLDRDQLKPEEDWRNFIGLSLASQEKFLEWKKVTTVLGDLLAEAIEDDSIAVVSPLRLRPQNGRVHKDTIAAVKKQTLGSAWSADAVKRIVDPEIYLAMKDALGKSKVLPEDSARTLELSDGRYLEADDEVLFFPKNAASILTPRGVAEIGGSIHHARLYSWLTKKGELKIGMLRVYGAEFPWLMRESGSHDVLRMPIHPGSQSFRDMQDTTRKAVESSEAVEFAWITQNDELEFEPEDYIAHGGKDELRQFLEFMPECRWRVDGFKKNYQIRIRPAMLSREQLPSDIQRRLESKTLTENESLLLKALDTGLVVAIGGLLPLGTLKVIRRNNLGFPRWRGNGNLPTSFEVRSSALRALGVEG

SEQ ID NO: 709 - protein, 297 aa, synthetic construct
  REGION 1..297: note = Category: MG4 chimeric effector
  REGION 1..297: note = Description: MG4-2 C-terminal fragment
VAIALTDPAALKSISQAASDERRGGRVSFGAVALPWVDFIGDVQAAIEAINVSHRPSRKVNGALHEETFYGPRGMDGDGRPTGYVQRKPVERLSAKEIPNIPDPAVREAVQAKLDEVGGTPAQAFKDPANHPVRKRGIPVHKVRLRLNINPVQVGSGATERHVLTGSNHHMEIIEVRDAKGGKKWTGRLVHRLEAKRRALGRETIVDRAVQAGRQFQFSLSPGDMIELTGEDGERKLHVVRSISEGRIEYVDARDARKKADIRASGDWRKPAVGSLLRLHCRKVVVTPFGEIRYAND

SEQ ID NO: 710 - protein, 309 aa, synthetic construct
  REGION 1..309: note = Category: MG4 chimeric effector
  REGION 1..309: note = Description: MG4-5 C-terminal fragment
VVIALTGPGTVQALTRAALRAKELGRRLFVPLDPPWADRDSFLRDVRASVEAITVSYRVDRKVSGQLHEESNYSKPHMTVDNKGNLVEHRHIRKPLKDMSVEEVEAIVDDRVRKLVQEKLRQLGQEPKKAFADEANHPYFTTADGRLVPIHKARIRKTVATITVGPPQCPRHVAPGLNHHIEILAVRDPAGAVTHWEGELVSLFEAARRVKAGEPVVRRNHGPNKDFLFSLAKGEYVEMELQPGKRQLFRVTVISAKQIEFRLHHDARPTMLLRKTPGARVIRSPGSLFKAKARKVAVDPLGNVFPAND

SEQ ID NO: 711 - protein, 319 aa, synthetic construct
  REGION 1..319: note = Category: MG6 chimeric effector
  REGION 1..319: note = Description: MG6-3 C-terminal fragment
IVVAFTNRSTLKRLSDENKRIGTAEWMDADESGRATNDEIKRRLGGRIDLSEPWPTFRNDVEVSINNITVSHRVNRKVSGALHEETYYGPTDEPAPKNKEMMVLRKSVHQLSKKDLGLIRDETIRQIVNDEVQKRMDNGESQANAIASLEADPPFIISPKAKVPIRKVRLLMKKDPQIMHYFENKNGEEDRAALYGNNHHIAIYETSDKNGVKKQIGIVIPMMEAARRVKDGDPIVMKDYRPDHTFLYSLAKNDMIFNHEDEQIYRVQKINSDGTIMFRQNNVAMKGQSDPGVYFKSGSRLGASKIKISPIGEIFPAND

SEQ ID NO: 712 - protein, 248 aa, synthetic construct
  REGION 1..248: note = Category: MG14 chimeric effector
  REGION 1..248: note = Description: MG14-1 C-terminal fragment
CVIAACSPSLVIKTARINQETHWSITRGMNETQRRDAIMKALESVMPWETFANEVRAAHDFVVPTRFVPRKGKGELFEQTVYRYAGVNAQGKDIARKASSDKDIVMGNAVVSADEKSVIKVSEMLCLRLWHDPEAKKGQGAWYADPVYKADIPALKDGTYVPRIAKAHTGRKAWKPVPESAMAKPPLEIYFGDLVQIGDFIGRFSGYNINNANWSFTDRLTRLNLSCPTVGQLNNDLSPVVIRESPIK

SEQ ID NO: 713 - protein, 354 aa, synthetic construct
  REGION 1..354: note = Category: MG15 chimeric effector
  REGION 1..354: note = Description: MG15-1 C-terminal fragment
VIIACATQGIVNKVSRYSKSRELWDYEVDMETGEVLQKKNKNTKDVFPEPWLNFRYELEQKVRVRPLDIPETADITEMEEPFVSHMPNRKIHGPAHKETIRSGRLKEEGYTISKTALIDLKLTEDKEEIKGYYNKESDRLLYEALKKQLQRYGGKAKEAFKEPFHKPKADGTPGPIVNKVKIMEKSTMLIPVNGGKGLASNGNMVRIDVFRAEEKGKKKYYFIPVYVADTVKEELPNRAVLAHKPYEAWKIMKEENFIFSLYPNDLIFVDAGKEIPFKAALKGSTLDPEKKASRFLMYYKGADIATGSISGVNHDETYKARGVGIQSLREIKKCCIDVLGNISFASKEKRQTFR

SEQ ID NO: 714 - protein, 368 aa, synthetic construct
  REGION 1..368: note = Category: MG16 chimeric effector
  REGION 1..368: note = Description: MG16-1 C-terminal fragment
LTVALTRQSYIQRLNTLEASHEHMEKLVKEANTPYKEKKSLLEKWVALQPHFSVEEVTTQVDGILVSFRAGKRVTTPARRAVYHGGKRTIVQRGIQVPRGALTEDTIYGKLGDKFVVKYALDHPSMKPENIVDPTIRLLVENRITALGKKDAFKTPLYSAEGMEIKSVRCYTSLSEKGVVPIKYNEKGNAIGFAKKGNNHHVAIYKDQSGQYQEMVVSFWDAVERKLYGVPTVITNPKTVWDELLEKELPQDFLEKLPKDNWQYVLSMQENEMFVLGMEEDEFNDAIDTQDYNTLNKHLYRVQKLSHADYTFRFHTETKVDDKYDGVENGRNTSMSLKALVRIRSFNGLFTQFPHKVKIDIMGRITKA

SEQ ID NO: 715 - protein, 432 aa, synthetic construct
  REGION 1..432: note = Category: MG16 chimeric effector
  REGION 1..432: note = Description: MG16-2 C-terminal fragment
LVVACTKQSYIQRLNNLNTERDAMYQDIEAQSVEWKEKHSLLEKWIKLQPHPTVSEVTDKVDEILVSFKAGKRVATLGKRSVYKNGKKTVVQNNIIVPRGALCEESVYGQINLIEKNKPIKYLFENPSLIFKPYIKALVEERLKEYNGDTSKAISSLKNNPIYLRKDKSVVLEYGTCYKKEYVKKYSLNSIKAKDVDSIIDKHIREVVRQRLEDNNNNEKAAFASPLYADKQKQIPIKSVRCTTGINIAAPVNYNESNDPISFVKPGNNHHIAIYKDKDGKRQEHIVTFWHAVERKKYGMPVVITNPKEIWDLIIEKSLDLPESFLNCLPNSDWNYEISMQQNEMFVMGMSEDEFQDAIRNNDYKTLNKYLYRVQSVSESDYWLRLHIETMNDKTPEGNIIKKYYRIKSINTFFNFNPHKVKITLLGEIQSS

SEQ ID NO: 716 - protein, 352 aa, synthetic construct
  REGION 1..352: note = Category: MG18 chimeric effector
  REGION 1..352: note = Description: MG18-1 C-terminal fragment
YLNAVVGNVYHEKFTKNPLRFVRSGQEYSLNLSALFQNWNIYKGGRVIWQKGEDGSLETVRARMAKNDPMVTRYCTEGRGALYDLQPMKKSKGQLPLKSSDERLQHIDRYGGYNKLAGAYFTLAAYYKKGKRVKSIESVPLYLAAKLQRDPAALQQYLADQLGTDRVEILVPEIKLGTLFKWNGYPMTLSGRTGPQLLFRNAAELRTNAEQEQYIKKMSRYLEKCKGRKEPLPIRPAYDKLTPEENLQLYDAFTQWLTSGIYAKRLSLQGKFLLEKRDAFAALSPEAQVRQLMEILHLFQCNPVAANLSELGGAAHAGILLASKNIDGKVPVSIVHQSVTGYFTQEVCLNDL

SEQ ID NO: 717 - protein, 359 aa, synthetic construct
  REGION 1..359: note = Category: MG21 chimeric effector
  REGION 1..359: note = Description: MG21-1 C-terminal fragment
AVIACITPGMIQKITKYAQNHERFYATAKGYVDIETGEVLTRSEYEAMDDIRFPEPWPGFRSELEARVSEHPQEAIARLKLPHYENSEEIRPIFVSRMPNHKVTGAAHLETIRSKKGGAGSTVTKTALPDLKLDKNGEIAGYYRKEDDPLLYEALKARLKAFGGDGKKAFAEPFHKPKHNGEPGPIVKKVKIQESATLTVPVNHGIAANGSMVRLDVFHVDGDGYYFVPIYTSDTVKPELPNRAVVAGRRVQEWKVMDDSYFKFSLYPKDLIRIRSKKGIKLKAVNRNADLQEYSTNDCLCYFVKFNISTGALSVENHDRKFEQPGLGGKTLLSIEKYQVDVLGNYSPVALPEKRMKFR

SEQ ID NO: 718 - protein, 430 aa, synthetic construct
  REGION 1..430: note = Category: MG22 chimeric effector
  REGION 1..430: note = Description: MG22-1 C-terminal fragment
IAIACINRSIVNYLNNAAANQTEREDLRRAVCIPERNGQTKRQLRSPWHCFARDAENALRQIVVSFKQNLRVATKATNSYECFDTASGKKIRKHQSNREHYAIRKPLHKDSVYGEVILTSIASVNLKKALLKAERILDKRLKEKIFELRKLYNYSNKQIEEHLTKVCINCPEWKNYDFKKIAVRILSNDADATHIVAIRKPLDESFDEVKINTITDTGIQKILLNHLSRYADDPKKAFSPEGIEDMNANIASLNGGKQHLPIYKVRVSEKDNGGYFPIGQKGNRPKKYVTTAKDTNLFFAVYADSKGKRSYKTIDLRTAIECRKQGLSVAPSINEKGDKLLFTLSPNDLVYMPSEGEEANGFAIDNNLNKDQIYKMVSANNKQCFFIPHTVADFISRGEEYNSHNKIELTEDRRSIKEHCVPLKVNRLGK

SEQ ID NO: 719 - protein, 370 aa, synthetic construct
  REGION 1..370: note = Category: MG23 chimeric effector
  REGION 1..370: note = Description: MG23-1 C-terminal fragment
YLNIVVGNTYSTKFTNNPLNFIKAGAKRPQDNQFKYNMDKIFDYNVISRGERAWIAGSDGSICTVKKFMSRNTVLITRKAKEVHGALSNKATIWGKNVAKPGAYLPVKSTDLKAQDVTKYGGITSIANSGYTLAEYKVNGKTTRSLEALPVYLGRAEQLTEKTVVDYLSSSLQESSKKKIEDIQVRKLFIPQGSKVKIDGFCYYLGGKTGDSIYLNNAVPLYLSSTSEEYLRKLLKAVENNNYNERDKNGQIILTAPKNVQLLSSIFDKLRSKPFSNNKWNIYFSIVNGKETKVEQLFSKLSIDKQAEVISQIVIWINSSRQNVNLSLIGGSAHSGTQALSKTVSRLNECMLISQSITGIYEHSVDLLTI

SEQ ID NO: 720 - protein, 348 aa, synthetic construct
  REGION 1..348: note = Category: SaCas chimeric effector
  REGION 1..348: note = Description: SaCas9 C-terminal fragment
LIIANADFIFKEWKKLDKAKKVMENQMFEEKQAESMPEIETEQEYKEIFITPHQIKHIKDFKDYKYSHRVDKKPNRELINDTLYSTRKDDKGNTLIVNNLNGLYDKDNDKLKKLINKSPEKLLMYHHDPQTYQKLKLIMEQYGDEKNPLYKYYEETGNYLTKYSKKDNGPVIKKIKYYGNKLNAHLDITDDYPNSRNKVVKLSLKPYRFDVYLDNGVYKFVTVKNLDVIKKENYYEVNSKCYEEAKKLKKISNQAEFIASFYNNDLIKINGELYRVIGVNNDLLNRIEVNMIDITYREYLENMNDKRPPRIIKTIASKTQSIKKYSTDILGNLYEVKSKKHPQIIKKG

SEQ ID NO: 721 - protein, 381 aa, synthetic construct
  REGION 1..381: note = Category: SpCas chimeric effector
  REGION 1..381: note = Description: SpCas9 C-terminal fragment
YLNAVVGTALIKKYPKLESEFVYGDYKVYDVRKMIAKSEQEIGKATAKYFFYSNIMNFFKTEITLANGEIRKRPLIETNGETGEIVWDKGRDFATVRKVLSMPQVNIVKKTEVQTGGFSKESILPKRNSDKLIARKKDWDPKKYGGFDSPTVAYSVLVVAKVEKGKSKKLKSVKELLGITIMERSSFEKNPIDFLEAKGYKEVKKDLIIKLPKYSLFELENGRKRMLASAGELQKGNELALPSKYVNFLYLASHYEKLKGSPEDNEQKQLFVEQHKHYLDEIIEQISEFSKRVILADANLDKVLSAYNKHRDKPIREQAENIIHLFTLTNLGAPAAFKYFDTTIDRKRYTSTKEVLDATLIHQSITGLYETRIDLSQLGGD

SEQ ID NO: 722 - RNA, 110 nt, synthetic construct; identical to SEQ ID NO: 35
  source 1..110: mol_type = other RNA
  misc_feature 1..110: note = Category: MG3-6_3-4 guide sgRNA scaffold
  misc_feature 1..110: note = Description: MG3-6_3-4 guide sequence scaffold

SEQ ID NO: 723 - RNA, 110 nt, synthetic construct
  source 1..110: mol_type = other RNA
  modified_base 1..3: mod_base = OTHER; note = 2'O-Methyl ribonucleotide
  modified_base 1..3: mod_base = OTHER; note = Phosphorothioate linkage
  modified_base 108..110: mod_base = OTHER; note = 2'O-Methyl ribonucleotide
  modified_base 107..109: mod_base = OTHER; note = Phosphorothioate linkage
gcacgcatcccaccacggacaagttgagaatcgaaagattcttaataaggcatccttccgatgctgacttctcaccgtccgttttccaataggagcgggcggtatgtttt

SEQ ID NO: 724 - RNA, 110 nt, synthetic construct
  source 1..110: mol_type = other RNA
  modified_base 1..3: mod_base = OTHER; note = 2'O-Methyl ribonucleotide
  modified_base 1..3: mod_base = OTHER; note = Phosphorothioate linkage
  modified_base 108..110: mod_base = OTHER; note = 2'O-Methyl ribonucleotide
  modified_base 107..109: mod_base = OTHER; note = Phosphorothioate linkage
gcacgcatcccaccatggacaagttgagaatcgaaagattcttaataaggcatccttccgatgctgacttctcaccgtccgttttccaataggagcgggcggtatgtttt

SEQ ID NO: 725 - RNA, 110 nt, synthetic construct
  source 1..110: mol_type = other RNA
  modified_base 1..3: mod_base = OTHER; note = 2'O-Methyl ribonucleotide
  modified_base 1..3: mod_base = OTHER; note = Phosphorothioate linkage
  modified_base 108..110: mod_base = OTHER; note = 2'O-Methyl ribonucleotide
  modified_base 107..109: mod_base = OTHER; note = Phosphorothioate linkage
acgcatcccaccacggacaagagttgagaatcgaaagattcttaataaggcatccttccgatgctgacttctcaccgtccgttttccaataggagcgggcggtatgtttt

SEQ ID NO: 726 - RNA, 110 nt, synthetic construct
  source 1..110: mol_type = other RNA
  modified_base 1..3: mod_base = OTHER; note = 2'O-Methyl ribonucleotide
  modified_base 1..3: mod_base = OTHER; note = Phosphorothioate linkage
  modified_base 108..110: mod_base = OTHER; note = 2'O-Methyl ribonucleotide
  modified_base 107..109: mod_base = OTHER; note = Phosphorothioate linkage
acgcatcccaccatggacaagagttgagaatcgaaagattcttaataaggcatccttccgatgctgacttctcaccgtccgttttccaataggagcgggcggtatgtttt

SEQ ID NO: 727 - RNA, 110 nt, synthetic construct
  source 1..110: mol_type = other RNA
  modified_base 1..3: mod_base = OTHER; note = 2'O-Methyl ribonucleotide
  modified_base 1..3: mod_base = OTHER; note = Phosphorothioate linkage
  modified_base 108..110: mod_base = OTHER; note = 2'O-Methyl ribonucleotide
  modified_base 107..109: mod_base = OTHER; note = Phosphorothioate linkage
cggacaagaaaaatgtctcctggttgagaatcgaaagattcttaataaggcatccttccgatgctgacttctcaccgtccgttttccaataggagcgggcggtatgtttt

SEQ ID NO: 728 - RNA, 110 nt, synthetic construct
  source 1..110: mol_type = other RNA
  modified_base 1..3: mod_base = OTHER; note = 2'O-Methyl ribonucleotide
  modified_base 1..3: mod_base = OTHER; note = Phosphorothioate linkage
  modified_base 108..110: mod_base = OTHER; note = 2'O-Methyl ribonucleotide
  modified_base 107..109: mod_base = OTHER; note = Phosphorothioate linkage
tggacaagaaaaatgtctcctggttgagaatcgaaagattcttaataaggcatccttccgatgctgacttctcaccgtccgttttccaataggagcgggcggtatgtttt

SEQ ID NO: 729 - RNA, 110 nt, synthetic construct
  source 1..110: mol_type = other RNA
  modified_base 1..3: mod_base = OTHER; note = 2'O-Methyl ribonucleotide
  modified_base 1..3: mod_base = OTHER; note = Phosphorothioate linkage
  modified_base 108..110: mod_base = OTHER; note = 2'O-Methyl ribonucleotide
  modified_base 107..109: mod_base = OTHER; note = Phosphorothioate linkage
ggagacatttttcttgtccgtggttgagaatcgaaagattcttaataaggcatccttccgatgctgacttctcaccgtccgttttccaataggagcgggcggtatgtttt

SEQ ID NO: 730 - RNA, 110 nt, synthetic construct
  source 1..110: mol_type = other RNA
  modified_base 1..3: mod_base = OTHER; note = 2'O-Methyl ribonucleotide
  modified_base 1..3: mod_base = OTHER; note = Phosphorothioate linkage
  modified_base 108..110: mod_base = OTHER; note = 2'O-Methyl ribonucleotide
  modified_base 107..109: mod_base = OTHER; note = Phosphorothioate linkage
ggagacatttttcttgtccatggttgagaatcgaaagattcttaataaggcatccttccgatgctgacttctcaccgtccgttttccaataggagcgggcggtatgtttt

SEQ ID NO: 731 - RNA, 110 nt, synthetic construct
  source 1..110: mol_type = other RNA
  modified_base 1..3: mod_base = OTHER; note = 2'O-Methyl ribonucleotide
  modified_base 1..3: mod_base = OTHER; note = Phosphorothioate linkage
  modified_base 108..110: mod_base = OTHER; note = 2'O-Methyl ribonucleotide
  modified_base 107..109: mod_base = OTHER; note = Phosphorothioate linkage
agacatttttcttgtccgtggtgttgagaatcgaaagattcttaataaggcatccttccgatgctgacttctcaccgtccgttttccaataggagcgggcggtatgtttt

SEQ ID NO: 732 - RNA, 110 nt, synthetic construct
  source 1..110: mol_type = other RNA
  modified_base 1..3: mod_base = OTHER; note = 2'O-Methyl ribonucleotide
  modified_base 1..3: mod_base = OTHER; note = Phosphorothioate linkage
  modified_base 108..110: mod_base = OTHER; note = 2'O-Methyl ribonucleotide
  modified_base 107..109: mod_base = OTHER; note = Phosphorothioate linkage
agacatttttcttgtccatggtgttgagaatcgaaagattcttaataaggcatccttccgatgctgacttctcaccgtccgttttccaataggagcgggcggtatgtttt

SEQ ID NO: 733 - RNA, 110 nt, synthetic construct
  source 1..110: mol_type = other RNA
  modified_base 1..3: mod_base = OTHER; note = 2'O-Methyl ribonucleotide
  modified_base 1..3: mod_base = OTHER; note = Phosphorothioate linkage
  modified_base 108..110: mod_base = OTHER; note = 2'O-Methyl ribonucleotide
  modified_base 107..109: mod_base = OTHER; note = Phosphorothioate linkage
tgtccgtggtgggatgcgtgctgttgagaatcgaaagattcttaataaggcatccttccgatgctgacttctcaccgtccgttttccaataggagcgggcggtatgtttt

SEQ ID NO: 734 - RNA, 110 nt, synthetic construct
  source 1..110: mol_type = other RNA
  modified_base 1..3: mod_base = OTHER; note = 2'O-Methyl ribonucleotide
  modified_base 1..3: mod_base = OTHER; note = Phosphorothioate linkage
  modified_base 108..110: mod_base = OTHER; note = 2'O-Methyl ribonucleotide
  modified_base 107..109: mod_base = OTHER; note = Phosphorothioate linkage
tgtccatggtgggatgcgtgctgttgagaatcgaaagattcttaataaggcatccttccgatgctgacttctcaccgtccgttttccaataggagcgggcggtatgtttt

SEQ ID NO: 735 - RNA, 110 nt, synthetic construct
  source 1..110: mol_type = other RNA
  modified_base 1..3: mod_base = OTHER; note = 2'O-Methyl ribonucleotide
  modified_base 1..3: mod_base = OTHER; note = Phosphorothioate linkage
  modified_base 108..110: mod_base = OTHER; note = 2'O-Methyl ribonucleotide
  modified_base 107..109: mod_base = OTHER; note = Phosphorothioate linkage
gtccgtggtgggatgcgtgctggttgagaatcgaaagattcttaataaggcatccttccgatgctgacttctcaccgtccgttttccaataggagcgggcggtatgtttt

SEQ ID NO: 736 - RNA, 110 nt, synthetic construct
  source 1..110: mol_type = other RNA
  modified_base 1..3: mod_base = OTHER; note = 2'O-Methyl ribonucleotide
  modified_base 1..3: mod_base = OTHER; note = Phosphorothioate linkage
  modified_base 108..110: mod_base = OTHER; note = 2'O-Methyl ribonucleotide
  modified_base 107..109: mod_base = OTHER; note = Phosphorothioate linkage
gtccatggtgggatgcgtgctggttgagaatcgaaagattcttaataaggcatccttccgatgctgacttctcaccgtccgttttccaataggagcgggcggtatgtttt

SEQ ID NO: 737 - RNA, 110 nt, synthetic construct
  source 1..110: mol_type = other RNA
  modified_base 1..3: mod_base = OTHER; note = 2'O-Methyl ribonucleotide
  modified_base 1..3: mod_base = OTHER; note = Phosphorothioate linkage
  modified_base 108..110: mod_base = OTHER; note = 2'O-Methyl ribonucleotide
  modified_base 107..109: mod_base = OTHER; note = Phosphorothioate linkage
tccgtggtgggatgcgtgctgtgttgagaatcgaaagattcttaataaggcatccttccgatgctgacttctcaccgtccgttttccaataggagcgggcggtatgtttt

SEQ ID NO: 738 - RNA, 110 nt, synthetic construct
  source 1..110: mol_type = other RNA
tccatggtgggatgcgtgctgtgttgagaatcgaaagattcttaataaggcatccttccgatgctgacttctcaccgtccgttttccaataggagcgggcggtatgtttt

SEQ ID NO: 739 - DNA, 22 bp, Homo sapiens
  source 1..22: mol_type = genomic DNA
gcacgcatcccaccacggacaa

SEQ ID NO: 740 - DNA, 22 bp, Homo sapiens
  source 1..22: mol_type = genomic DNA
gcacgcatcccaccatggacaa

SEQ ID NO: 741 - DNA, 22 bp, Homo sapiens
  source 1..22: mol_type = genomic DNA
acgcatcccaccacggacaaga

SEQ ID NO: 742 - DNA, 22 bp, Homo sapiens
  source 1..22: mol_type = genomic DNA
acgcatcccaccatggacaaga

SEQ ID NO: 743 - DNA, 22 bp, Homo sapiens
  source 1..22: mol_type = genomic DNA
cggacaagaaaaatgtctcctg

SEQ ID NO: 744 - DNA, 22 bp, Homo sapiens
  source 1..22: mol_type = genomic DNA
tggacaagaaaaatgtctcctg

SEQ ID NO: 745 - DNA, 22 bp, Homo sapiens
  source 1..22: mol_type = genomic DNA
ggagacatttttcttgtccgtg

SEQ ID NO: 746 - DNA, 22 bp, Homo sapiens
  source 1..22: mol_type = genomic DNA
ggagacatttttcttgtccatg

SEQ ID NO: 747 - DNA, 22 bp, Homo sapiens
  source 1..22: mol_type = genomic DNA
agacatttttcttgtccgtggt

SEQ ID NO: 748 - DNA, 22 bp, Homo sapiens
  source 1..22: mol_type = genomic DNA
agacatttttcttgtccatggt

SEQ ID NO: 749 - DNA, 22 bp, Homo sapiens
  source 1..22: mol_type = genomic DNA
tgtccgtggtgggatgcgtgct

SEQ ID NO: 750 - DNA, 22 bp, Homo sapiens
  source 1..22: mol_type = genomic DNA
tgtccatggtgggatgcgtgct

SEQ ID NO: 751 - DNA, 22 bp, Homo sapiens
  source 1..22: mol_type = genomic DNA
gtccgtggtgggatgcgtgctg

SEQ ID NO: 752 - DNA, 22 bp, Homo sapiens
  source 1..22: mol_type = genomic DNA
gtccatggtgggatgcgtgctg

SEQ ID NO: 753 - DNA, 22 bp, Homo sapiens
  source 1..22: mol_type = genomic DNA
tccgtggtgggatgcgtgctgt

SEQ ID NO: 754 - DNA, 22 bp, Homo sapiens
  source 1..22: mol_type = genomic DNA
tccatggtgggatgcgtgctgt

SEQ ID NO: 755 - RNA, 110 nt, synthetic construct
  source 1..110: mol_type = other RNA
  modified_base 1..3: mod_base = OTHER; note = 2'O-Methyl ribonucleotide
  modified_base 1..3: mod_base = OTHER; note = Phosphorothioate linkage
  modified_base 108..110: mod_base = OTHER; note = 2'O-Methyl ribonucleotide
  modified_base 107..109: mod_base = OTHER; note = Phosphorothioate linkage
cagcacgcatcccaccacggacgttgagaatcgaaagattcttaataaggcatccttccgatgctgacttctcaccgtccgttttccaataggagcgggcggtatgtttt

SEQ ID NO: 756 - RNA, 110 nt, synthetic construct
  source 1..110: mol_type = other RNA
  modified_base 1..3: mod_base = OTHER; note = 2'O-Methyl ribonucleotide
  modified_base 1..3: mod_base = OTHER; note = Phosphorothioate linkage
  modified_base 108..110: mod_base = OTHER; note = 2'O-Methyl ribonucleotide
  modified_base 107..109: mod_base = OTHER; note = Phosphorothioate linkage
cagcacgcatcccaccatggacgttgagaatcgaaagattcttaataaggcatccttccgatgctgacttctcaccgtccgttttccaataggagcgggcggtatgtttt

SEQ ID NO: 757 - RNA, 110 nt, synthetic construct
  source 1..110: mol_type = other RNA
  modified_base 1..3: mod_base = OTHER; note = 2'O-Methyl ribonucleotide
  modified_base 1..3: mod_base = OTHER; note = Phosphorothioate linkage
  modified_base 108..110: mod_base = OTHER; note = 2'O-Methyl ribonucleotide
  modified_base 107..109: mod_base = OTHER; note = Phosphorothioate linkage
agcacgcatcccaccacggacagttgagaatcgaaagattcttaataaggcatccttccgatgctgacttctcaccgtccgttttccaataggagcgggcggtatgtttt

SEQ ID NO: 758 - RNA, 110 nt, synthetic construct
  source 1..110: mol_type = other RNA
  modified_base 1..3: mod_base = OTHER; note = 2'O-Methyl ribonucleotide
  modified_base 1..3: mod_base = OTHER; note = Phosphorothioate linkage
  modified_base 108..110: mod_base = OTHER; note = 2'O-Methyl ribonucleotide
  modified_base 107..109: mod_base = OTHER; note = Phosphorothioate linkage
agcacgcatcccaccatggacagttgagaatcgaaagattcttaataaggcatccttccgatgctgacttctcaccgtccgttttccaataggagcgggcggtatgtttt

SEQ ID NO: 759 - RNA, 110 nt, synthetic construct; identical to SEQ ID NO: 723
  source 1..110: mol_type = other RNA
  modified_base 1..3: mod_base = OTHER; note = 2'O-Methyl ribonucleotide
  modified_base 1..3: mod_base = OTHER; note = Phosphorothioate linkage
  modified_base 108..110: mod_base = OTHER; note = 2'O-Methyl ribonucleotide
  modified_base 107..109: mod_base = OTHER; note = Phosphorothioate linkage

SEQ ID NO: 760 - RNA, 110 nt, synthetic construct; identical to SEQ ID NO: 724
  source 1..110: mol_type = other RNA
  modified_base 1..3: mod_base = OTHER; note = 2'O-Methyl ribonucleotide
  modified_base 1..3: mod_base = OTHER; note = Phosphorothioate linkage
  modified_base 108..110: mod_base = OTHER; note = 2'O-Methyl ribonucleotide
  modified_base 107..109: mod_base = OTHER; note = Phosphorothioate linkage

SEQ ID NO: 761 - RNA, 110 nt, synthetic construct
  source 1..110: mol_type = other RNA
  modified_base 1..3: mod_base = OTHER; note = 2'O-Methyl ribonucleotide
  modified_base 1..3: mod_base = OTHER; note = Phosphorothioate linkage
  modified_base 108..110: mod_base = OTHER; note = 2'O-Methyl ribonucleotide
  modified_base 107..109: mod_base = OTHER; note = Phosphorothioate linkage
cacgcatcccaccacggacaaggttgagaatcgaaagattcttaataaggcatccttccgatgctgacttctcaccgtccgttttccaataggagcgggcggtatgtttt

SEQ ID NO: 762 - RNA, 110 nt, synthetic construct
  source 1..110: mol_type = other RNA
  modified_base 1..3: mod_base = OTHER; note = 2'O-Methyl ribonucleotide
  modified_base 1..3: mod_base = OTHER; note = Phosphorothioate linkage
  modified_base 108..110: mod_base = OTHER; note = 2'O-Methyl ribonucleotide
  modified_base 107..109: mod_base = OTHER; note = Phosphorothioate linkage
cacgcatcccaccatggacaaggttgagaatcgaaagattcttaataaggcatccttccgatgctgacttctcaccgtccgttttccaataggagcgggcggtatgtttt

SEQ ID NO: 763 - DNA, 22 bp, Homo sapiens
  source 1..22: mol_type = genomic DNA
cagcacgcatcccaccacggac

SEQ ID NO: 764 - DNA, 22 bp, Homo sapiens
  source 1..22: mol_type = genomic DNA
cagcacgcatcccaccatggac

SEQ ID NO: 765 - DNA, 22 bp, Homo sapiens
  source 1..22: mol_type = genomic DNA
agcacgcatcccaccacggaca

SEQ ID NO: 766 - DNA, 22 bp, Homo sapiens
  source 1..22: mol_type = genomic DNA
agcacgcatcccaccatggaca

SEQ ID NO: 767 - DNA, 22 bp, Homo sapiens
  source 1..22: mol_type = genomic DNA
gcacgcatcccaccacggacaa

SEQ ID NO: 768 - DNA, 22 bp, Homo sapiens
  source 1..22: mol_type = genomic DNA
gcacgcatcccaccatggacaa

SEQ ID NO: 769 - DNA, 22 bp, Homo sapiens
  source 1..22: mol_type = genomic DNA
cacgcatcccaccacggacaag

SEQ ID NO: 770 - DNA, 22 bp, Homo sapiens
  source 1..22: mol_type = genomic DNA
cacgcatcccaccatggacaag

SEQ ID NO: 771 - protein, 1125 aa, synthetic construct; identical to SEQ ID NO: 9

SEQ ID NO: 772 - protein, 1123 aa, synthetic construct; identical to SEQ ID NO: 11

SEQ ID NO: 773 - protein, 1134 aa, synthetic construct; identical to SEQ ID NO: 12

SEQ ID NO: 774 - protein, 1127 aa, synthetic construct
MSTDMKNYRIGVDVGDRSVGLAAIEFDDDGLPIQKLALVTFRHDGGLDPTKNKTPMSRKETRGIARRTMRMNRERKRRLRNLDNVLENLGYSVPEGPEPETYEAWTSRALLASIKLASADELNEHLVRAVRHMARHRGWANPWWSLDQLEKASQEPSETFEIILARARELFGEKVPANPTLGMLGALAANNEVLLRPRDEKKRKTGYVRGTPLMFAQVRQGDQLAELRRICEVQGIEDQYEALRLGVFDHKHPYVPKERVGKDPLNPSTNRTIRASLEFQEFRILDSVANLRVRIGSRAKRELTEAEYDAAVEFLMDYADKEQPSWADVAEKIGVPGNRLVAPVLEDVQQKTAPYDRSSAAFEKAMGKKTEARQWWESTDDDQLRSLLIAFLVDATNDTEEAAAEAGLSELYKSWPAEEREALSNIDFEKGRVAYSQETLSKLSEYMHEYRVGLHEARKAVFGVDDTWRPPLDKLEEPTGQPAVDRVLTILRRFVLDCERQWGRPRAITVEHTRTGLMGPTQRQKILNEQKKNRADNERIRDELRESGVDNPSRAEVRRHLIVQEQECQCLYCGTMITTTTSELDHIVPRAGGGSSRRENLAAVCRACNAKKKRELFYAWAGPVKSQETIERVRQLKAFKDSKKAKMFKNQIRRLNQTEADEPIDERSLASTSYAAVAVRERLEQHFNEGLALDDKSRVVLDVYAGAVTRESRRAGGIDERILLRGERDKNRFDVRHHAVDAAVMTLLNRSVALTLEQRSQLRRTFYEQGLDKLDRNQLKPEEDWRDFTGLAPASQEKFLEWRKAATILGDLLAEAIEDDSIAVVSPLRLRPQNGSVHDATVMKALERDLWGEWDAQAIDRLVDPELHLALRKLFTSTKSKKIDVDATSQGLPERYLANQTVQLFDADAPSVMSPRGILRIGAGTHHARLLTWDDPKKGPQLGIQRVFAAEFGEILKDASSNDLFEAPIPFHTMSHRDLQPKVRAAVEQGLTRQIGWITQGDELEIDPADFVGEANAFGNFLREFPERSWSIAGLKKSNTIVIRPLLLSQEGVTAAISPHAAKIVENGIELSNSTLFTAPGTGIIRRTGLGRPRWDSGPAHLPESFNVHARMTQQSARDLEHHHHHH

SEQ ID NO: 775 - protein, 1140 aa, synthetic construct
MSTDMKNYRIGVDVGDRSVGLAAIEFDDDGLPIQKLALVTFRHDGGLDPTKNKTPMSRKETRGIARRTMRMNRERKRRLRNLDNVLENLGYSVPEGPEPETYEAWTSRALLASIKLASADELNEHLVRAVRHMARHRGWANPWWSLDQLEKASQEPSETFEIILARARELFGEKVPANPTLGMLGALAANNEVLLRPRDEKKRKTGYVRGTPLMFAQVRQGDQLAELRRICEVQGIEDQYEALRLGVFDHKHPYVPKERVGKDPLNPSTNRTIRASLEFQEFRILDSVANLRVRIGSRAKRELTEAEYDAAVEFLMDYADKEQPSWADVAEKIGVPGNRLVAPVLEDVQQKTAPYDRSSAAFEKAMGKKTEARQWWESTDDDQLRSLLIAFLVDATNDTEEAAAEAGLSELYKSWPAEEREALSNIDFEKGRVAYSQETLSKLSEYMHEYRVGLHEARKAVFGVDDTWRPPLDKLEEPTGQPAVDRVLTILRRFVLDCERQWGRPRAITVEHTRTGLMGPTQRQKILNEQKKNRADNERIRDELRESGVDNPSRAEVRRHLIVQEQECQCLYCGTMITTTTSELDHIVPRAGGGSSRRENLAAVCRACNAKKKRELFYAWAGPVKSQETIERVRQLKAFKDSKKAKMFKNQIRRLNQTEADEPIDERSLASTSYAAVAVRERLEQHFNEGLALDDKSRVVLDVYAGAVTRESRRAGGIDERILLRGERDKNRFDVRHHAVDAAVMTLLNRSVALTLEQRSQLRRTFYEQGLDKLDRNQLKPEEDWRDFTGLAPASQEKFLEWRKAATILGDLLAEAIEDDSIAVVSPLRLRPQNGSVHDDSVRPLTRQKIDSTWDRKSINRIVDPEIHVAMRRLLNNGTSLPEDKNRVLDLPDGNELGPHDEVELFSTSAASIKLRRGGSAEIGGSIHHARVYAWMGAKGQLEYGMMRVFGAEFPTLTKLSGSKDILRMPIHAGSMSYRDMQDRVRKPIESDIAVELGWITQGDELEILPEAHLETAGGLGDFLKSFPETQWTIDGFNDPSRLRVRPRLMSLEGRDTIDAMGHLSDTEKLKIKQALSKGLMVSASELLSHGAKIIRRDHLGRPRWRGNARPVSIELEQVANQLVNHRSVDGQLEHHHHHH

SEQ ID NO: 776 - protein, 1139 aa, synthetic construct
MSTDMKNYRIGVDVGDRSVGLAAIEFDDDGLPIQKLALVTFRHDGGLDPTKNKTPMSRKETRGIARRTMRMNRERKRRLRNLDNVLENLGYSVPEGPEPETYEAWTSRALLASIKLASADELNEHLVRAVRHMARHRGWANPWWSLDQLEKASQEPSETFEIILARARELFGEKVPANPTLGMLGALAANNEVLLRPRDEKKRKTGYVRGTPLMFAQVRQGDQLAELRRICEVQGIEDQYEALRLGVFDHKHPYVPKERVGKDPLNPSTNRTIRASLEFQEFRILDSVANLRVRIGSRAKRELTEAEYDAAVEFLMDYADKEQPSWADVAEKIGVPGNRLVAPVLEDVQQKTAPYDRSSAAFEKAMGKKTEARQWWESTDDDQLRSLLIAFLVDATNDTEEAAAEAGLSELYKSWPAEEREALSNIDFEKGRVAYSQETLSKLSEYMHEYRVGLHEARKAVFGVDDTWRPPLDKLEEPTGQPAVDRVLTILRRFVLDCERQWGRPRAITVEHTRTGLMGPTQRQKILNEQKKNRADNERIRDELRESGVDNPSRAEVRRHLIVQEQECQCLYCGTMITTTTSELDHIVPRAGGGSSRRENLAAVCRACNAKKKRELFYAWAGPVKSQETIERVRQLKAFKDSKKAKMFKNQIRRLNQTEADEPIDERSLASTSYAAVAVRERLEQHFNEGLALDDKSRVVLDVYAGAVTRESRRAGGIDERILLRGERDKNRFDVRHHAVDAAVMTLLNRSVALTLEQRSQLRRTFYEQGLDKLDRNQLKPEEDWRDFTGLAPASQEKFLEWRKAATILGDLLAEAIEDDSIAVVSPLRLRPQNGSVHKDTVEAVLERTVGDSWTDKQVSRIVDPNTYIAFLSLLGRKKELDADHQRLVSVSAGVKLLADERVQIFPEEAASILTPRGVVKIGDSIHHARLYGWKNQRGDIQVGMLRVFGAEFPWFMRESGVKDILRVPIPQGSQSYRDLAATTRKFIENGQATEFGWITQNDEIEISAEEYLATDKGDILSDFLGILPEIRWKVTGIEDNRRIRLRPLLLSSEAIPNMLNGRLLTQEEHDLIALVINKGVRVVVSTFLALPSTKIIRRNNLGIPRWRGNGHLPTSLDIQRAATQALEGRDLEHHHHHH

SEQ ID NO: 777 - protein, 1142 aa, synthetic construct
MSTDMKNYRIGVDVGDRSVGLAAIEFDDDGLPIQKLALVTFRHDGGLDPTKNKTPMSRKETRGIARRTMRMNRERKRRLRNLDNVLENLGYSVPEGPEPETYEAWTSRALLASIKLASADELNEHLVRAVRHMARHRGWANPWWSLDQLEKASQEPSETFEIILARARELFGEKVPANPTLGMLGALAANNEVLLRPRDEKKRKTGYVRGTPLMFAQVRQGDQLAELRRICEVQGIEDQYEALRLGVFDHKHPYVPKERVGKDPLNPSTNRTIRASLEFQEFRILDSVANLRVRIGSRAKRELTEAEYDAAVEFLMDYADKEQPSWADVAEKIGVPGNRLVAPVLEDVQQKTAPYDRSSAAFEKAMGKKTEARQWWESTDDDQLRSLLIAFLVDATNDTEEAAAEAGLSELYKSWPAEEREALSNIDFEKGRVAYSQETLSKLSEYMHEYRVGLHEARKAVFGVDDTWRPPLDKLEEPTGQPAVDRVLTILRRFVLDCERQWGRPRAITVEHTRTGLMGPTQRQKILNEQKKNRADNERIRDELRESGVDNPSRAEVRRHLIVQEQECQCLYCGTMITTTTSELDHIVPRAGGGSSRRENLAAVCRACNAKKKRELFYAWAGPVKSQETIERVRQLKAFKDSKKAKMFKNQIRRLNQTEADEPIDERSLASTSYAAVAVRERLEQHFNEGLALDDKSRVVLDVYAGAVTRESRRAGGIDERILLRGERDKNRFDVRHHAVDAAVMTLLNRSVALTLEQRSQLRRTFYEQGLDKLDRNQLKPEEDWRDFTGLAPASQEKFLEWRKAATILGDLLAEAIEDDSIAVVSPLRLRPQNGSVHDDTINAVKKLTLGSAWPADAVKRIVDPEIYLAMKDVLGKLKELPEDSARSLELSDGRYIEADDEVLFFPKKAASILTPRGAAEIGNSIHHARLYSWLTKKGELKFGMLRVYGAEFPWLMRESGSRDVLHMPIHPGSQSFRGMQDGVRKAVESGEAVEFGWITQDDELEFDPEDYIAHGGDDELNRLLRVMPERRWRVDGFYNAGTLRIRPALLSAEQLPSELQKKVADKTLSDVELILLRAVQRGLFVAISSFLPLESLKVIRRNNLGFPRWRGNGNLPTSFEVRSSALRALGVEGLEHHHHHH

SEQ ID NO: 778 - protein, 1135 aa, synthetic construct
MSTDMKNYRIGVDVGDRSVGLAAIEFDDDGLPIQKLALVTFRHDGGLDPTKNKTPMSRKETRGIARRTMRMNRERKRRLRNLDNVLENLGYSVPEGPEPETYEAWTSRALLASIKLASADELNEHLVRAVRHMARHRGWANPWWSLDQLEKASQEPSETFEIILARARELFGEKVPANPTLGMLGALAANNEVLLRPRDEKKRKTGYVRGTPLMFAQVRQGDQLAELRRICEVQGIEDQYEALRLGVFDHKHPYVPKERVGKDPLNPSTNRTIRASLEFQEFRILDSVANLRVRIGSRAKRELTEAEYDAAVEFLMDYADKEQPSWADVAEKIGVPGNRLVAPVLEDVQQKTAPYDRSSAAFEKAMGKKTEARQWWESTDDDQLRSLLIAFLVDATNDTEEAAAEAGLSELYKSWPAEEREALSNIDFEKGRVAYSQETLSKLSEYMHEYRVGLHEARKAVFGVDDTWRPPLDKLEEPTGQPAVDRVLTILRRFVLDCERQWGRPRAITVEHTRTGLMGPTQRQKILNEQKKNRADNERIRDELRESGVDNPSRAEVRRHLIVQEQECQCLYCGTMITTTTSELDHIVPRAGGGSSRRENLAAVCRACNAKKKRELFYAWAGPVKSQETIERVRQLKAFKDSKKAKMFKNQIRRLNQTEADEPIDERSLASTSYAAVAVRERLEQHFNEGLALDDKSRVVLDVYAGAVTRESRRAGGIDERILLRGERDKNRFDVRHHAVDAAVMTLLNRSVALTLEQRSQLRRTFYEQGLDKLDRNQLKPEEDWRDFTGLAPASQEKFLEWRKAATILGDLLAEAIEDDSIAVVSPLRLRPQNGSVHLDTVDAVLERTIGDAWTVDQVHRIVNPQIYLAFAGYLGNQKALDPDSSRVLALNDGRKLTAEDVIYVFPEKAASILTPRGVVKIGESVHHVRLYAWKNRKGKAEVGMLRVFGAEFPWLMRESGVKDVLRVPIHTGSQSYRDLSFTVRKNIEKGEAAEIGWLTQNEELEFNPESYLQEGGKDKLAKFLAFLPETRWRVDGFPMPDKLRIRPALLSREEIPEGVFRTEEQSLLEEALTKGLIIATKGLLSLPDVKVLRRNNLGIPRWRGGSYRPVSLDIQRAALAALDEQELEHHHHHH

SEQ ID NO: 779 - protein, 1142 aa, synthetic construct
MSTDMKNYRIGVDVGDRSVGLAAIEFDDDGLPIQKLALVTFRHDGGLDPTKNKTPMSRKETRGIARRTMRMNRERKRRLRNLDNVLENLGYSVPEGPEPETYEAWTSRALLASIKLASADELNEHLVRAVRHMARHRGWANPWWSLDQLEKASQEPSETFEIILARARELFGEKVPANPTLGMLGALAANNEVLLRPRDEKKRKTGYVRGTPLMFAQVRQGDQLAELRRICEVQGIEDQYEALRLGVFDHKHPYVPKERVGKDPLNPSTNRTIRASLEFQEFRILDSVANLRVRIGSRAKRELTEAEYDAAVEFLMDYADKEQPSWADVAEKIGVPGNRLVAPVLEDVQQKTAPYDRSSAAFEKAMGKKTEARQWWESTDDDQLRSLLIAFLVDATNDTEEAAAEAGLSELYKSWPAEEREALSNIDFEKGRVAYSQETLSKLSEYMHEYRVGLHEARKAVFGVDDTWRPPLDKLEEPTGQPAVDRVLTILRRFVLDCERQWGRPRAITVEHTRTGLMGPTQRQKILNEQKKNRADNERIRDELRESGVDNPSRAEVRRHLIVQEQECQCLYCGTMITTTTSELDHIVPRAGGGSSRRENLAAVCRACNAKKKRELFYAWAGPVKSQETIERVRQLKAFKDSKKAKMFKNQIRRLNQTEADEPIDERSLASTSYAAVAVRERLEQHFNEGLALDDKSRVVLDVYAGAVTRESRRAGGIDERILLRGERDKNRFDVRHHAVDAAVMTLLNRSVALTLEQRSQLRRTFYEQGLDKLDRNQLKPEEDWRDFTGLAPASQEKFLEWRKAATILGDLLAEAIEDDSIAVVSPLRLRPQNGSVHKDTIAAVKKQTLGSAWSADAVKRIVDPEIYLAMKDALGKSKVLPEDSARTLELSDGRYLEADDEVLFFPKNAASILTPRGVAEIGGSIHHARLYSWLTKKGELKIGMLRVYGAEFPWLMRESGSHDVLRMPIHPGSQSFRDMQDTTRKAVESSEAVEFAWITQNDELEFEPEDYIAHGGKDELRQFLEFMPECRWRVDGFKKNYQIRIRPAMLSREQLPSDIQRRLESKTLTENESLLLKALDTGLVVAIGGLLPLGTLKVIRRNNLGFPRWRGNGNLPTSFEVRSSALRALGVEGLEHHHHHH

SEQ ID NO: 780 - protein, 1142 aa, synthetic construct
MSTDMKNYRIGVDVGDRSVGLAAIEFDDDGLPIQKLALVTFRHDGGLDPTKNKTPMSRKETRGIARRTMRMNRERKRRLRNLDNVLENLGYSVPEGPEPETYEAWTSRALLASIKLASADELNEHLVRAVRHMARHRGWANPWWSLDQLEKASQEPSETFEIILARARELFGEKVPANPTLGMLGALAANNEVLLRPRDEKKRKTGYVRGTPLMFAQVRQGDQLAELRRICEVQGIEDQYEALRLGVFDHKHPYVPKERVGKDPLNPSTNRTIRASLEFQEFRILDSVANLRVRIGSRAKRELTEAEYDAAVEFLMDYADKEQPSWADVAEKIGVPGNRLVAPVLEDVQQKTAPYDRSSAAFEKAMGKKTEARQWWESTDDDQLRSLLIAFLVDATNDTEEAAAEAGLSELYKSWPAEEREALSNIDFEKGRVAYSQETLSKLSEYMHEYRVGLHEARKAVFGVDDTWRPPLDKLEEPTGQPAVDRVLTILRRFVLDCERQWGRPRAITVEHTRTGLMGPTQRQKILNEQKKNRADNERIRDELRESGVDNPSRAEVRRHLIVQEQECQCLYCGTMITTTTSELDHIVPRAGGGSSRRENLAAVCRACNAKKKRELFYAWAGPVKSQETIERVRQLKAFKDSKKAKMFKNQIRRLNQTEADEPIDERSLASTSYAAVAVRERLEQHFNEGLALDDKSRVVLDVYAGAVTRESRRAGGIDERILLRGERDKNRFDVRHHAVDAAVMTLLNRSVALTLEQRSQLRRTFYEQGLDKLDRNQLKPEEDWRDFTGLAPASQEKFLEWRKAATILGDLLAEAIEDDSIAVVSPLRLRPQNGSVHDETIDPVKKQTLGSDWPADAVKRIVDPEIYLAMKDALGKLKELPEDSARSLELPDGRFVEADDEVLFFPENAASILTPRGVAEIGGSIHHARLYGWLTKKGELKVGMLRVYGAEFPWLMRESGSRNVLSMPIHRGSQSFRDMQDTTRKAVESGEAVEFAWITQNDELEFDPDDYIAHGGKDELRQFLGFMPECRWRVDGFKKNYQIRIRPAMLSREQLPSDIQRRLESKTLTKNESLLLKALDTGLVVAIGGLLPLETLKVIRRNNLGFPRWRGNGNLPTSFEVRSSALRALGVEGLEHHHHHH

SEQ ID NO: 781 - protein, 1142 aa, synthetic construct
MSTDMKNYRIGVDVGDRSVGLAAIEFDDDGLPIQKLALVTFRHDGGLDPTKNKTPMSRKETRGIARRTMRMNRERKRRLRNLDNVLENLGYSVPEGPEPETYEAWTSRALLASIKLASADELNEHLVRAVRHMARHRGWANPWWSLDQLEKASQEPSETFEIILARARELFGEKVPANPTLGMLGALAANNEVLLRPRDEKKRKTGYVRGTPLMFAQVRQGDQLAELRRICEVQGIEDQYEALRLGVFDHKHPYVPKERVGKDPLNPSTNRTIRASLEFQEFRILDSVANLRVRIGSRAKRELTEAEYDAAVEFLMDYADKEQPSWADVAEKIGVPGNRLVAPVLEDVQQKTAPYDRSSAAFEKAMGKKTEARQWWESTDDDQLRSLLIAFLVDATNDTEEAAAEAGLSELYKSWPAEEREALSNIDFEKGRVAYSQETLSKLSEYMHEYRVGLHEARKAVFGVDDTWRPPLDKLEEPTGQPAVDRVLTILRRFVLDCERQWGRPRAITVEHTRTGLMGPTQRQKILNEQKKNRADNERIRDELRESGVDNPSRAEVRRHLIVQEQECQCLYCGTMITTTTSELDHIVPRAGGGSSRRENLAAVCRACNAKKKRELFYAWAGPVKSQETIERVRQLKAFKDSKKAKMFKNQIRRLNQTEADEPIDERSLASTSYAAVAVRERLEQHFNEGLALDDKSRVVLDVYAGAVTRESRRAGGIDERILLRGERDKNRFDVRHHAVDAAVMTLLNRSVALTLEQRSQLRRTFYEQGLDKLDRNQLKPEEDWRDFTGLAPASQEKFLEWRKAATILGDLLAEAIEDDSIAVVSPLRLRPQNGSVHLETISAVKKQTLGSAWPSDAVKRIVDPEIYLAMKEALGKLKELPEDSARSLELPDGRFVEADDEVLFFPENAASILTPRGVAEIGESIHHARLYGWLTKKGELKVGMLRVYGAEFPWLMRESGSRDVLRMPIHPGSQSFRGMQDGVRKMVESGEAVEFGWITQNDELEFEPADYITHIRKNKLGQFLELMPEKRWRVDGFNDAGRLKIRPALLSWEQLPDEIQDKMNAGTLNEDEKNLFKIVKEGTLVSVGDFFQLETSKVIRRNNLGFPRWRGNGSLPTSFEVRFSALRALGVEGLEHHHHHH

SEQ ID NO: 782 - protein, 1135 aa, synthetic construct
MSTDMKNYRIGVDVGDRSVGLAAIEFDDDGLPIQKLALVTFRHDGGLDPTKNKTPMSRKETRGIARRTMRMNRERKRRLRNLDNVLENLGYSVPEGPEPETYEAWTSRALLASIKLASADELNEHLVRAVRHMARHRGWANPWWSLDQLEKASQEPSETFEIILARARELFGEKVPANPTLGMLGALAANNEVLLRPRDEKKRKTGYVRGTPLMFAQVRQGDQLAELRRICEVQGIEDQYEALRLGVFDHKHPYVPKERVGKDPLNPSTNRTIRASLEFQEFRILDSVANLRVRIGSRAKRELTEAEYDAAVEFLMDYADKEQPSWADVAEKIGVPGNRLVAPVLEDVQQKTAPYDRSSAAFEKAMGKKTEARQWWESTDDDQLRSLLIAFLVDATNDTEEAAAEAGLSELYKSWPAEEREALSNIDFEKGRVAYSQETLSKLSEYMHEYRVGLHEARKAVFGVDDTWRPPLDKLEEPTGQPAVDRVLTILRRFVLDCERQWGRPRAITVEHTRTGLMGPTQRQKILNEQKKNRADNERIRDELRESGVDNPSRAEVRRHLIVQEQECQCLYCGTMITTTTSELDHIVPRAGGGSSRRENLAAVCRACNAKKKRELFYAWAGPVKSQETIERVRQLKAFKDSKKAKMFKNQIRRLNQTEADEPIDERSLASTSYAAVAVRERLEQHFNEGLALDDKSRVVLDVYAGAVTRESRRAGGIDERILLRGERDKNRFDVRHHAVDAAVMTLLNRSVALTLEQRSQLRRTFYEQGLDKLDRNQLKPEEDWRDFTGLAPASQEKFLEWRKAATILGDLLAEAIEDDSIAVVSPLRLRPQNGSVHLDTVDAVLERTIGDAWTVDQVHRIVNPQIYLAFAGYLGNQKALEPDPSRVLALNDGRKLTAEDVIYVFPEKAASILTPRGVVKIGESVHHVRLYAWKNRKGKAEVGMLRVFGAEFPWLMRESGVKDVLRVPIHTGSQSYRDLSFTVRKNIEKGEAVEIGWLTQNEELEFNPESYLQEGGKDKLAKFLAFLPETRWRVDGFPMPDKLRIRPALLSREEIPEGVFGIEAQSLLEEALTKGLIIATKGLLSLPDVKVLRRNNLGIPRWRGGSYRPVSLDIQRAALAALDEQELEHHHHHH

SEQ ID NO: 783 - protein, 1142 aa, synthetic construct
MSTDMKNYRIGVDVGDRSVGLAAIEFDDDGLPIQKLALVTFRHDGGLDPTKNKTPMSRKETRGIARRTMRMNRERKRRLRNLDNVLENLGYSVPEGPEPETYEAWTSRALLASIKLASADELNEHLVRAVRHMARHRGWANPWWSLDQLEKASQEPSETFEIILARARELFGEKVPANPTLGMLGALAANNEVLLRPRDEKKRKTGYVRGTPLMFAQVRQGDQLAELRRICEVQGIEDQYEALRLGVFDHKHPYVPKERVGKDPLNPSTNRTIRASLEFQEFRILDSVANLRVRIGSRAKRELTEAEYDAAVEFLMDYADKEQPSWADVAEKIGVPGNRLVAPVLEDVQQKTAPYDRSSAAFEKAMGKKTEARQWWESTDDDQLRSLLIAFLVDATNDTEEAAAEAGLSELYKSWPAEEREALSNIDFEKGRVAYSQETLSKLSEYMHEYRVGLHEARKAVFGVDDTWRPPLDKLEEPTGQPAVDRVLTILRRFVLDCERQWGRPRAITVEHTRTGLMGPTQRQKILNEQKKNRADNERIRDELRESGVDNPSRAEVRRHLIVQEQECQCLYCGTMITTTTSELDHIVPRAGGGSSRRENLAAVCRACNAKKKRELFYAWAGPVKSQETIERVRQLKAFKDSKKAKMFKNQIRRLNQTEADEPIDERSLASTSYAAVAVRERLEQHFNEGLALDDKSRVVLDVYAGAVTRESRRAGGIDERILLRGERDKNRFDVRHHAVDAAVMTLLNRSVALTLEQRSQLRRTFYEQGLDKLDRNQLKPEEDWRDFTGLAPASQEKFLEWRKAATILGDLLAEAIEDDSIAVVSPLRLRPQNGSVHKDTIAAVKKQTLGSAWSADAVKHIVDPEIYLAMKDTLGKLKELPEDSARSFELSDGRYIEADDEVLFFPKNAASILTPRGVAEIGESIHHARLYGWLTKKGELKVGMLRVYGAEFPWLMRESGSRNVLSMPIHPGSQSFRGMQDGVRKVVESGEAVEFAWITQNDELEFDPADYIAHGGKDGLRQFLEFMPESRWRVDGLTTNYQLLLRPAMLSREQLPSDLQEKMVAKTLTEDETLLLKALERGLSIAVNSVLPLESLKVIRRNNLGFPRWRGNGNLPTSFEVRSSALRALGVEGLEHHHHHH

SEQ ID NO: 784 - protein, 1114 aa, synthetic construct
MSTDMKNYRIGVDVGDRSVGLAAIEFDDDGLPIQKLALVTFRHDGGLDPTKNKTPMSRKETRGIARRTMRMNRERKRRLRNLDNVLENLGYSVPEGPEPETYEAWTSRALLASIKLASADELNEHLVRAVRHMARHRGWANPWWSLDQLEKASQEPSETFEIILARARELFGEKVPANPTLGMLGALAANNEVLLRPRDEKKRKTGYVRGTPLMFAQVRQGDQLAELRRICEVQGIEDQYEALRLGVFDHKHPYVPKERVGKDPLNPSTNRTIRASLEFQEFRILDSVANLRVRIGSRAKRELTEAEYDAAVEFLMDYADKEQPSWADVAEKIGVPGNRLVAPVLEDVQQKTAPYDRSSAAFEKAMGKKTEARQWWESTDDDQLRSLLIAFLVDATNDTEEAAAEAGLSELYKSWPAEEREALSNIDFEKGRVAYSQETLSKLSEYMHEYRVGLHEARKAVFGVDDTWRPPLDKLEEPTGQPAVDRVLTILRRFVLDCERQWGRPRAITVEHTRTGLMGPTQRQKILNEQKKNRADNERIRDELRESGVDNPSRAEVRRHLIVQEQECQCLYCGTMITTTTSELDHIVPRAGGGSSRRENLAAVCRACNAKKKRELFYAWAGPVKSQETIERVRQLKAFKDSKKAKMFKNQIRRLNQTEADEPIDERSLASTSYAAVAVRERLEQHFNEGLALDDKSRVVLDVYAGAVTRESRRAGGIDERILLRGERDKNRFDVRHHAVDAAVMTLLNRSVALTLEQRSQLRRTFYEQGLDKLDRNQLKPEEDWRDFTGLAPASQEKFLEWRKAATILGDLLAEAIEDDSIAVVSPLRLRPQNGSVHKPIAEEWSEKEIERIVSPDVHAAVTEAIGLKGGKLSATSCSNVILQNGKFGEKVALAKSSAACIQVNGGVVEIGESIHHARLFAWRGRRGAIEMGMVRVFTAELPYILKNSTHGDVLTATIPASTFSFRNTPATLRKKLLAGEAVSVGWLTQNDEIEIEVDEFACGNTSFAKFLTEIPEKRWRVDGFYDNRRLRIRPAYLSAEGLTDNHSKVVHETLEKGQFVNAGALLSASRTLLIRRTALGAPRWKLDSSGLPVSFSPLKLAEEALLEHHHHHH

SEQ ID NO: 785 - protein, 1139 aa, synthetic construct
MSTDMKNYRIGVDVGDRSVGLAAIEFDDDGLPIQKLALVTFRHDGGLDPTKNKTPMSRKETRGIARRTMRMNRERKRRLRNLDNVLENLGYSVPEGPEPETYEAWTSRALLASIKLASADELNEHLVRAVRHMARHRGWANPWWSLDQLEKASQEPSETFEIILARARELFGEKVPANPTLGMLGALAANNEVLLRPRDEKKRKTGYVRGTPLMFAQVRQGDQLAELRRICEVQGIEDQYEALRLGVFDHKHPYVPKERVGKDPLNPSTNRTIRASLEFQEFRILDSVANLRVRIGSRAKRELTEAEYDAAVEFLMDYADKEQPSWADVAEKIGVPGNRLVAPVLEDVQQKTAPYDRSSAAFEKAMGKKTEARQWWESTDDDQLRSLLIAFLVDATNDTEEAAAEAGLSELYKSWPAEEREALSNIDFEKGRVAYSQETLSKLSEYMHEYRVGLHEARKAVFGVDDTWRPPLDKLEEPTGQPAVDRVLTILRRFVLDCERQWGRPRAITVEHTRTGLMGPTQRQKILNEQKKNRADNERIRDELRESGVDNPSRAEVRRHLIVQEQECQCLYCGTMITTTTSELDHIVPRAGGGSSRRENLAAVCRACNAKKKRELFYAWAGPVKSQETIERVRQLKAFKDSKKAKMFKNQIRRLNQTEADEPIDERSLASTSYAAVAVRERLEQHFNEGLALDDKSRVVLDVYAGAVTRESRRAGGIDERILLRGERDKNRFDVRHHAVDAAVMTLLNRSVALTLEQRSQLRRTFYEQGLDKLDRNQLKPEEDWRDFTGLAPASQEKFLEWRKAATILGDLLAEAIEDDSIAVVSPLRLRPQNGSVHLDTVDGVLERTIGDAWTVDQVHRIVNPQIYLAFAGYLGNQKALDPDSSRVLALNDGRKLTAEDVIYVFPEKAASILTPRGVVKIGESVHHVRLYAWKNRKGKAEVGMLRVFGAEFPWLMRESGVKDVLRVPIHTGSQSYRDLSDTVCKHIEQGVAQEIGWVTQNDELEFDPDDYLQNGGKDKLAKFLSFMPENRWRIDGFQTSTKLRIRPALLSWEELPTRLYGKELAENQYALLEESLKTGLIIATKGLLSLESSKIIRRNNLGIPRWRGGSYRPVSLDIQRAALAALDEQELEHHHHHH

SEQ ID NO: 786 - protein, 1136 aa, synthetic construct
MSTDMKNYRIGVDVGDRSVGLAAIEFDDDGLPIQKLALVTFRHDGGLDPTKNKTPMSRKETRGIARRTMRMNRERKRRLRNLDNVLENLGYSVPEGPEPETYEAWTSRALLASIKLASADELNEHLVRAVRHMARHRGWANPWWSLDQLEKASQEPSETFEIILARARELFGEKVPANPTLGMLGALAANNEVLLRPRDEKKRKTGYVRGTPLMFAQVRQGDQLAELRRICEVQGIEDQYEALRLGVFDHKHPYVPKERVGKDPLNPSTNRTIRASLEFQEFRILDSVANLRVRIGSRAKRELTEAEYDAAVEFLMDYADKEQPSWADVAEKIGVPGNRLVAPVLEDVQQKTAPYDRSSAAFEKAMGKKTEARQWWESTDDDQLRSLLIAFLVDATNDTEEAAAEAGLSELYKSWPAEEREALSNIDFEKGRVAYSQETLSKLSEYMHEYRVGLHEARKAVFGVDDTWRPPLDKLEEPTGQPAVDRVLTILRRFVLDCERQWGRPRAITVEHTRTGLMGPTQRQKILNEQKKNRADNERIRDELRESGVDNPSRAEVRRHLIVQEQECQCLYCGTMITTTTSELDHIVPRAGGGSSRRENLAAVCRACNAKKKRELFYAWAGPVKSQETIERVRQLKAFKDSKKAKMFKNQIRRLNQTEADEPIDERSLASTSYAAVAVRERLEQHFNEGLALDDKSRVVLDVYAGAVTRESRRAGGIDERILLRGERDKNRFDVRHHAVDAAVMTLLNRSVALTLEQRSQLRRTFYEQGLDKLDRNQLKPEEDWRDFTGLAPASQEKFLEWRKAATILGDLLAEAIEDDSIAVVSPLRLRPQNGSVHDDTIRPLEERALGAEWDPATIKRVVDPSIYLALVDALGKSKSLPADSQRELVLDDGTLMSADDSIALFSTNAASILTPRGAAEIGGSVHHVRLYAWRDRKGEIEVGMQRVFGAEFPWLMRESGVKDVFKVPVHRGSQSYRDLQDGVRKQIESGAAVEIGWITQGDEIQLNLDEVRDSMRSKELLTFLEIFPETRWRVDGLPDNRRLRMRPVLLASEGIEEFLKNAPEDIQTIVVNFFKNGALLSVSKVLALTETKIIRYNHLGFPRWRGVGRPVSLDIQRAAREALEGKKLEHHHHHH

SEQ ID NO: 787 - protein, 1132 aa, synthetic construct
MSTDMKNYRIGVDVGDRSVGLAAIEFDDDGLPIQKLALVTFRHDGGLDPTKNKTPMSRKETRGIARRTMRMNRERKRRLRNLDNVLENLGYSVPEGPEPETYEAWTSRALLASIKLASADELNEHLVRAVRHMARHRGWANPWWSLDQLEKASQEPSETFEIILARARELFGEKVPANPTLGMLGALAANNEVLLRPRDEKKRKTGYVRGTPLMFAQVRQGDQLAELRRICEVQGIEDQYEALRLGVFDHKHPYVPKERVGKDPLNPSTNRTIRASLEFQEFRILDSVANLRVRIGSRAKRELTEAEYDAAVEFLMDYADKEQPSWADVAEKIGVPGNRLVAPVLEDVQQKTAPYDRSSAAFEKAMGKKTEARQWWESTDDDQLRSLLIAFLVDATNDTEEAAAEAGLSELYKSWPAEEREALSNIDFEKGRVAYSQETLSKLSEYMHEYRVGLHEARKAVFGVDDTWRPPLDKLEEPTGQPAVDRVLTILRRFVLDCERQWGRPRAITVEHTRTGLMGPTQRQKILNEQKKNRADNERIRDELRESGVDNPSRAEVRRHLIVQEQECQCLYCGTMITTTTSELDHIVPRAGGGSSRRENLAAVCRACNAKKKRELFYAWAGPVKSQETIERVRQLKAFKDSKKAKMFKNQIRRLNQTEADEPIDERSLASTSYAAVAVRERLEQHFNEGLALDDKSRVVLDVYAGAVTRESRRAGGIDERILLRGERDKNRFDVRHHAVDAAVMTLLNRSVALTLEQRSQLRRTFYEQGLDKLDRNQLKPEEDWRDFTGLAPASQEKFLEWRKAATILGDLLAEAIEDDSIAVVSPLRLRPQNGSVHKDTLSSLDKMYLGGSWSSKDIARVVDPDIYLALMELLGRATTLDEDPQRSLTVKGKVLQADQEIKLFPESAASILAGTGAVKIGDSLHHARLYAWPTKKGHEIGMLRVFGAEFPWLFKTYGTKNALTVPIHPGSQSYRDMKDTLRKKIESGEAREIGWITQGDEIEIKIESYLQENDELGRFINLIPENRWKIDGFNDNGRLRLRPILLSYEEIPESYGEDVLGAKNHQLIRKVLERGAIITAGKILGAEGTKVLRRNHLGAPVWQGQQEARSLDISRAITEKLEGLEHHHHHH

SEQ ID NO: 788 - protein, 1128 aa, synthetic construct
MSTDMKNYRIGVDVGDRSVGLAAIEFDDDGLPIQKLALVTFRHDGGLDPTKNKTPMSRKETRGIARRTMRMNRERKRRLRNLDNVLENLGYSVPEGPEPETYEAWTSRALLASIKLASADELNEHLVRAVRHMARHRGWANPWWSLDQLEKASQEPSETFEIILARARELFGEKVPANPTLGMLGALAANNEVLLRPRDEKKRKTGYVRGTPLMFAQVRQGDQLAELRRICEVQGIEDQYEALRLGVFDHKHPYVPKERVGKDPLNPSTNRTIRASLEFQEFRILDSVANLRVRIGSRAKRELTEAEYDAAVEFLMDYADKEQPSWADVAEKIGVPGNRLVAPVLEDVQQKTAPYDRSSAAFEKAMGKKTEARQWWESTDDDQLRSLLIAFLVDATNDTEEAAAEAGLSELYKSWPAEEREALSNIDFEKGRVAYSQETLSKLSEYMHEYRVGLHEARKAVFGVDDTWRPPLDKLEEPTGQPAVDRVLTILRRFVLDCERQWGRPRAITVEHTRTGLMGPTQRQKILNEQKKNRADNERIRDELRESGVDNPSRAEVRRHLIVQEQECQCLYCGTMITTTTSELDHIVPRAGGGSSRRENLAAVCRACNAKKKRELFYAWAGPVKSQETIERVRQLKAFKDSKKAKMFKNQIRRLNQTEADEPIDERSLASTSYAAVAVRERLEQHFNEGLALDDKSRVVLDVYAGAVTRESRRAGGIDERILLRGERDKNRFDVRHHAVDAAVMTLLNRSVALTLEQRSQLRRTFYEQGLDKLDRNQLKPEEDWRDFTGLAPASQEKFLEWRKAATILGDLLAEAIEDDSIAVVSPLRLRPQNGSVHKDTVSALVRKQLGAPWTAQEILQIVDPEIYVHLRDLAAQNKGVLELDPSRRIQLLSGVWISGSELVEVFPKAAASMKVSSGSVEIGEQIHHARVYAWRGTKGEFQYGILRVFTAELPWLQRQAQSKDLFTMNIDDRSMSYRDLLQTVRKKIESDEARCIGWLTQNDELVLNVEVLRQGSDKIAHFLSTYPESRWKLDGFPENRRFRIRPLYLSREGSDHLDPICAEILEKGAIVGTSNLLSNVHQIIRRDSLGFERWRSQGGLPASWSVPDSTADTVETGLKLEHHHHHH

SEQ ID NO: 789 - protein, 1123 aa, synthetic construct
MSTDMKNYRIGVDVGDRSVGLAAIEFDDDGLPIQKLALVTFRHDGGLDPTKNKTPMSRKETRGIARRTMRMNRERKRRLRNLDNVLENLGYSVPEGPEPETYEAWTSRALLASIKLASADELNEHLVRAVRHMARHRGWANPWWSLDQLEKASQEPSETFEIILARARELFGEKVPANPTLGMLGALAANNEVLLRPRDEKKRKTGYVRGTPLMFAQVRQGDQLAELRRICEVQGIEDQYEALRLGVFDHKHPYVPKERVGKDPLNPSTNRTIRASLEFQEFRILDSVANLRVRIGSRAKRELTEAEYDAAVEFLMDYADKEQPSWADVAEKIGVPGNRLVAPVLEDVQQKTAPYDRSSAAFEKAMGKKTEARQWWESTDDDQLRSLLIAFLVDATNDTEEAAAEAGLSELYKSWPAEEREALSNIDFEKGRVAYSQETLSKLSEYMHEYRVGLHEARKAVFGVDDTWRPPLDKLEEPTGQPAVDRVLTILRRFVLDCERQWGRPRAITVEHTRTGLMGPTQRQKILNEQKKNRADNERIRDELRESGVDNPSRAEVRRHLIVQEQECQCLYCGTMITTTTSELDHIVPRAGGGSSRRENLAAVCRACNAKKKRELFYAWAGPVKSQETIERVRQLKAFKDSKKAKMFKNQIRRLNQTEADEPIDERSLASTSYAAVAVRERLEQHFNEGLALDDKSRVVLDVYAGAVTRESRRAGGIDERILLRGERDKNRFDVRHHAVDAAVMTLLNRSVALTLEQRSQLRRTFYEQGLDKLDRNQLKPEEDWRDFTGLAPASQEKFLEWRKAATILGDLLAEAIEDDSIAVVSPLRLRPQNGSVHKDTVRAAVPKRLGDAWSAAELDAVVSPAAHMALSSVFDGAAELPHDDGRMLTVRKRRLHADDTISLLPGHAAAIEVNGGVVEIGESIHHARLVAWRDRKGVIQFGMVRVFTAEIPFMQRLAGKKDVFSIPVHPSTLSYRGVQLRVRKALDAGIAVELGWITQGDEIEIGLDDVASMTPEFRQFIAEIPEQRWRVDGFKDGGRLRVRPALLSAEGDAAVSDLVSKTLDKGSFVNAAGFIGAPSSVVIRRSALGVPRWRSAQGHLPVSFSPYQRAENLLLEHHHHHH

SEQ ID NO: 790 - protein, 1122 aa, synthetic construct
MSTDMKNYRIGVDVGDRSVGLAAIEFDDDGLPIQKLALVTFRHDGGLDPTKNKTPMSRKETRGIARRTMRMNRERKRRLRNLDNVLENLGYSVPEGPEPETYEAWTSRALLASIKLASADELNEHLVRAVRHMARHRGWANPWWSLDQLEKASQEPSETFEIILARARELFGEKVPANPTLGMLGALAANNEVLLRPRDEKKRKTGYVRGTPLMFAQVRQGDQLAELRRICEVQGIEDQYEALRLGVFDHKHPYVPKERVGKDPLNPSTNRTIRASLEFQEFRILDSVANLRVRIGSRAKRELTEAEYDAAVEFLMDYADKEQPSWADVAEKIGVPGNRLVAPVLEDVQQKTAPYDRSSAAFEKAMGKKTEARQWWESTDDDQLRSLLIAFLVDATNDTEEAAAEAGLSELYKSWPAEEREALSNIDFEKGRVAYSQETLSKLSEYMHEYRVGLHEARKAVFGVDDTWRPPLDKLEEPTGQPAVDRVLTILRRFVLDCERQWGRPRAITVEHTRTGLMGPTQRQKILNEQKKNRADNERIRDELRESGVDNPSRAEVRRHLIVQEQECQCLYCGTMITTTTSELDHIVPRAGGGSSRRENLAAVCRACNAKKKRELFYAWAGPVKSQETIERVRQLKAFKDSKKAKMFKNQIRRLNQTEADEPIDERSLASTSYAAVAVRERLEQHFNEGLALDDKSRVVLDVYAGAVTRESRRAGGIDERILLRGERDKNRFDVRHHAVDAAVMTLLNRSVALTLEQRSQLRRTFYEQGLDKLDRNQLKPEEDWRDFTGLAPASQEKFLEWRKAATILGDLLAEAIEDDSIAVVSPLRLRPQNGSVHADTIVPFDYKALESEWTDKDIVRVVDNELYLALVDALGGKKVLPTDKISVIDQDLAKDHRQVALYGTPSPQIPVRGGSAAISDSLHHFRVYAWKDKKGAIQFGQQRVFGAEFRAMWGDPRQVDVFTAPVPRWAFAHREMPPKVKAAIEAGNAKQIGWYTRNDEIELDLSELMAQSNVLGEFLRELPEKSWRIRGSHSLSRLSLSPLYLSSEGTDLSEQSRPVQDAVSKGIPVSASSILDSESMIIRRGPLGIPKWNGGNATSYSFRQVAEEVLGTDLEHHHHHH

SEQ ID NO: 791 - protein, 1119 aa, synthetic construct
MSTDMKNYRIGVDVGDRSVGLAAIEFDDDGLPIQKLALVTFRHDGGLDPTKNKTPMSRKETRGIARRTMRMNRERKRRLRNLDNVLENLGYSVPEGPEPETYEAWTSRALLASIKLASADELNEHLVRAVRHMARHRGWANPWWSLDQLEKASQEPSETFEIILARARELFGEKVPANPTLGMLGALAANNEVLLRPRDEKKRKTGYVRGTPLMFAQVRQGDQLAELRRICEVQGIEDQYEALRLGVFDHKHPYVPKERVGKDPLNPSTNRTIRASLEFQEFRILDSVANLRVRIGSRAKRELTEAEYDAAVEFLMDYADKEQPSWADVAEKIGVPGNRLVAPVLEDVQQKTAPYDRSSAAFEKAMGKKTEARQWWESTDDDQLRSLLIAFLVDATNDTEEAAAEAGLSELYKSWPAEEREALSNIDFEKGRVAYSQETLSKLSEYMHEYRVGLHEARKAVFGVDDTWRPPLDKLEEPTGQPAVDRVLTILRRFVLDCERQWGRPRAITVEHTRTGLMGPTQRQKILNEQKKNRADNERIRDELRESGVDNPSRAEVRRHLIVQEQECQCLYCGTMITTTTSELDHIVPRAGGGSSRRENLAAVCRACNAKKKRELFYAWAGPVKSQETIERVRQLKAFKDSKKAKMFKNQIRRLNQTEADEPIDERSLASTSYAAVAVRERLEQHFNEGLALDDKSRVVLDVYAGAVTRESRRAGGIDERILLRGERDKNRFDVRHHAVDAAVMTLLNRSVALTLEQRSQLRRTFYEQGLDKLDRNQLKPEEDWRDFTGLAPASQEKFLEWRKAATILGDLLAEAIEDDSIAVVSPLRLRPQNGSVHEDIIRPFETRELGGTWSPKELERIVDRRLYTVLHDRASSATSGMEVTEELCAELGSTVETTVDLYGSPAAQIPVRGGSARLGSIHHARLYAWHGTRGIEFGMVRVFAGELAAMWPSPATDVLTAPVPTWSMSYRRAAPPVMKRLRADTAVPIGWIAPGDEIVVLPRQEGARASSLDDLVASVGEDRWTITGFEQPGIINIVPRLLSAEGISEETPEAVASVLTRSGRPSTNSLVPRIRVIRRDALGRERQRGGGRLPSSFVPFEVAEQRLQGDLEHHHHHH

SEQ ID NO: 792 - protein, 1119 aa, synthetic construct
MSTDMKNYRIGVDVGDRSVGLAAIEFDDDGLPIQKLALVTFRHDGGLDPTKNKTPMSRKETRGIARRTMRMNRERKRRLRNLDNVLENLGYSVPEGPEPETYEAWTSRALLASIKLASADELNEHLVRAVRHMARHRGWANPWWSLDQLEKASQEPSETFEIILARARELFGEKVPANPTLGMLGALAANNEVLLRPRDEKKRKTGYVRGTPLMFAQVRQGDQLAELRRICEVQGIEDQYEALRLGVFDHKHPYVPKERVGKDPLNPSTNRTIRASLEFQEFRILDSVANLRVRIGSRAKRELTEAEYDAAVEFLMDYADKEQPSWADVAEKIGVPGNRLVAPVLEDVQQKTAPYDRSSAAFEKAMGKKTEARQWWESTDDDQLRSLLIAFLVDATNDTEEAAAEAGLSELYKSWPAEEREALSNIDFEKGRVAYSQETLSKLSEYMHEYRVGLHEARKAVFGVDDTWRPPLDKLEEPTGQPAVDRVLTILRRFVLDCERQWGRPRAITVEHTRTGLMGPTQRQKILNEQKKNRADNERIRDELRESGVDNPSRAEVRRHLIVQEQECQCLYCGTMITTTTSELDHIVPRAGGGSSRRENLAAVCRACNAKKKRELFYAWAGPVKSQETIERVRQLKAFKDSKKAKMFKNQIRRLNQTEADEPIDERSLASTSYAAVAVRERLEQHFNEGLALDDKSRVVLDVYAGAVTRESRRAGGIDERILLRGERDKNRFDVRHHAVDAAVMTLLNRSVALTLEQRSQLRRTFYEQGLDKLDRNQLKPEEDWRDFTGLAPASQEKFLEWRKAATILGDLLAEAIEDDSIAVVSPLRLRPQNGSVHEDKVRPFDSRPLGGTWSAKELERIVDRRLYTALHHVAASATSGVEVTPELCTELGSSMGATVKLYGSPAAQIPVRGGSARLGAIHHARLYAWRGTRGIEFGMMRVFAGELTAMWPSPATDVLTAPVPEWSMSYRRTAPAVMQQLRSDTAVQVGWIAPGDEIVVLPPREGARASSLDSLVSSVGEDRWTVTGFERATTINVAPRLLSAEGISEETPKAVTSVLNRPGRLAASSLLPRIRVIRRDALGRERRRGGGRLPSSFVPFEVAEQRLQGDLEHHHHHH

SEQ ID NO: 793 - protein, 1143 aa, synthetic construct
MSTDMKNYRIGVDVGDRSVGLAAIEFDDDGLPIQKLALVTFRHDGGLDPTKNKTPMSRKETRGIARRTMRMNRERKRRLRNLDNVLENLGYSVPEGPEPETYEAWTSRALLASIKLASADELNEHLVRAVRHMARHRGWANPWWSLDQLEKASQEPSETFEIILARARELFGEKVPANPTLGMLGALAANNEVLLRPRDEKKRKTGYVRGTPLMFAQVRQGDQLAELRRICEVQGIEDQYEALRLGVFDHKHPYVPKERVGKDPLNPSTNRTIRASLEFQEFRILDSVANLRVRIGSRAKRELTEAEYDAAVEFLMDYADKEQPSWADVAEKIGVPGNRLVAPVLEDVQQKTAPYDRSSAAFEKAMGKKTEARQWWESTDDDQLRSLLIAFLVDATNDTEEAAAEAGLSELYKSWPAEEREALSNIDFEKGRVAYSQETLSKLSEYMHEYRVGLHEARKAVFGVDDTWRPPLDKLEEPTGQPAVDRVLTILRRFVLDCERQWGRPRAITVEHTRTGLMGPTQRQKILNEQKKNRADNERIRDELRESGVDNPSRAEVRRHLIVQEQECQCLYCGTMITTTTSELDHIVPRAGGGSSRRENLAAVCRACNAKKKRELFYAWAGPVKSQETIERVRQLKAFKDSKKAKMFKNQIRRLNQTEADEPIDERSLASTSYAAVAVRERLEQHFNEGLALDDKSRVVLDVYAGAVTRESRRAGGIDERILLRGERDKNRFDVRHHAVDAAVMTLLNRSVALTLEQRSQLRRTFYEQGLDKLDRNQLKPEEDWRDFTGLAPASQEKFLEWRKAATILGDLLAEAIEDDSIAVVSPLRLRPQNGSVHKETIAAVKKQTLGSSWSADAVKRIVDPEIYLAMKDALGKLKELPEDSARSLELSDGRYIEADDEVLFFPENAASILTPRGVAEIGGSIHHARLYSWLTKKGDLKVNVLRVYGAEFPWLMRESGSSDVLRMPIHPGSQSFRDVQEETIEMIEGGFAKEIAWITQNDELEFDPVEYINLPGRSDKLTRFLIYMPETRWRVDGFPESRNLRIRPLMLSQEDLPSEIKKHKEEKQLSDEEKLLVEALEKGLIITSSKLLGLKSIKVIRRNNLGFPRWRGNGNLPTSFEVRSSALRALGVEGLEHHHHHH

SEQ ID NO: 794 - protein, 1129 aa, synthetic construct
MSTDMKNYRIGVDVGDRSVGLAAIEFDDDGLPIQKLALVTFRHDGGLDPTKNKTPMSRKETRGIARRTMRMNRERKRRLRNLDNVLENLGYSVPEGPEPETYEAWTSRALLASIKLASADELNEHLVRAVRHMARHRGWANPWWSLDQLEKASQEPSETFEIILARARELFGEKVPANPTLGMLGALAANNEVLLRPRDEKKRKTGYVRGTPLMFAQVRQGDQLAELRRICEVQGIEDQYEALRLGVFDHKHPYVPKERVGKDPLNPSTNRTIRASLEFQEFRILDSVANLRVRIGSRAKRELTEAEYDAAVEFLMDYADKEQPSWADVAEKIGVPGNRLVAPVLEDVQQKTAPYDRSSAAFEKAMGKKTEARQWWESTDDDQLRSLLIAFLVDATNDTEEAAAEAGLSELYKSWPAEEREALSNIDFEKGRVAYSQETLSKLSEYMHEYRVGLHEARKAVFGVDDTWRPPLDKLEEPTGQPAVDRVLTILRRFVLDCERQWGRPRAITVEHTRTGLMGPTQRQKILNEQKKNRADNERIRDELRESGVDNPSRAEVRRHLIVQEQECQCLYCGTMITTTTSELDHIVPRAGGGSSRRENLAAVCRACNAKKKRELFYAWAGPVKSQETIERVRQLKAFKDSKKAKMFKNQIRRLNQTEADEPIDERSLASTSYAAVAVRERLEQHFNEGLALDDKSRVVLDVYAGAVTRESRRAGGIDERILLRGERDKNRFDVRHHAVDAAVMTLLNRSVALTLEQRSQLRRTFYEQGLDKLDRNQLKPEEDWRDFTGLAPASQEKFLEWRKAATILGDLLAEAIEDDSIAVVSPLRLRPQNGSVHKDEIQKPEKYPPMLWGEWNSTAIDRVIDPELHLALRKLLTSTKSNKITVDATTPGLPDRYRSNSLIPLFAQDAPAMMSPRGIILIGKARHHARILTWDDPKKGPQLGIQRVFAAELGEMLKDASSNDLFEAPIPFHTMSHRDLQPQVRAAVEQGLTRQIGWITLGDEIEIDPSDFAEDTTKFGKFLREFPERNWSIAGLKESRKLVLRPLMLSAEGASPANSSLTAEVLDGGVKVHPSTLLASPGTTIIRRTGLGRPRWDSGLAHLPESFNVHARMTQQSARDLEHHHHHH

SEQ ID NO: 795 - protein, 1139 aa, synthetic construct
MSTDMKNYRIGVDVGDRSVGLAAIEFDDDGLPIQKLALVTFRHDGGLDPTKNKTPMSRKETRGIARRTMRMNRERKRRLRNLDNVLENLGYSVPEGPEPETYEAWTSRALLASIKLASADELNEHLVRAVRHMARHRGWANPWWSLDQLEKASQEPSETFEIILARARELFGEKVPANPTLGMLGALAANNEVLLRPRDEKKRKTGYVRGTPLMFAQVRQGDQLAELRRICEVQGIEDQYEALRLGVFDHKHPYVPKERVGKDPLNPSTNRTIRASLEFQEFRILDSVANLRVRIGSRAKRELTEAEYDAAVEFLMDYADKEQPSWADVAEKIGVPGNRLVAPVLEDVQQKTAPYDRSSAAFEKAMGKKTEARQWWESTDDDQLRSLLIAFLVDATNDTEEAAAEAGLSELYKSWPAEEREALSNIDFEKGRVAYSQETLSKLSEYMHEYRVGLHEARKAVFGVDDTWRPPLDKLEEPTGQPAVDRVLTILRRFVLDCERQWGRPRAITVEHTRTGLMGPTQRQKILNEQKKNRADNERIRDELRESGVDNPSRAEVRRHLIVQEQECQCLYCGTMITTTTSELDHIVPRAGGGSSRRENLAAVCRACNAKKKRELFYAWAGPVKSQETIERVRQLKAFKDSKKAKMFKNQIRRLNQTEADEPIDERSLASTSYAAVAVRERLEQHFNEGLALDDKSRVVLDVYAGAVTRESRRAGGIDERILLRGERDKNRFDVRHHAVDAAVMTLLNRSVALTLEQRSQLRRTFYEQGLDKLDRNQLKPEEDWRDFTGLAPASQEKFLEWRKAATILGDLLAEAIEDDSIAVVSPLRLRPQNGSVHKDTVEAVLERTVGDSWTDKQVSRIVDPNTYIAFLSLLGKKKELEADHQRLVSVSAGVKLLADERVQIFPEEAASILTPRGVVKIGDSIHHARLYGWKNQRGDIQVGMLRVFGAEFPWFMRESGVKDILRVPIPQGSQSYRDLAATTRKFIENGQATEFGWITQNDEIEISAEEYLATDKGDILSDFLTVLPENRWKVVGIGDNRRFKIRPLLLSNEIIPDTLNGRSIKSEERDLIVSVLDKGVRVVASTLLTLPSTKIIRRNNLGIPRWRGNSHLPTSLDIQRAATQALEGRDLEHHHHHH

SEQ ID NO: 796 - protein, 1139 aa, synthetic construct
MSTDMKNYRIGVDVGDRSVGLAAIEFDDDGLPIQKLALVTFRHDGGLDPTKNKTPMSRKETRGIARRTMRMNRERKRRLRNLDNVLENLGYSVPEGPEPETYEAWTSRALLASIKLASADELNEHLVRAVRHMARHRGWANPWWSLDQLEKASQEPSETFEIILARARELFGEKVPANPTLGMLGALAANNEVLLRPRDEKKRKTGYVRGTPLMFAQVRQGDQLAELRRICEVQGIEDQYEALRLGVFDHKHPYVPKERVGKDPLNPSTNRTIRASLEFQEFRILDSVANLRVRIGSRAKRELTEAEYDAAVEFLMDYADKEQPSWADVAEKIGVPGNRLVAPVLEDVQQKTAPYDRSSAAFEKAMGKKTEARQWWESTDDDQLRSLLIAFLVDATNDTEEAAAEAGLSELYKSWPAEEREALSNIDFEKGRVAYSQETLSKLSEYMHEYRVGLHEARKAVFGVDDTWRPPLDKLEEPTGQPAVDRVLTILRRFVLDCERQWGRPRAITVEHTRTGLMGPTQRQKILNEQKKNRADNERIRDELRESGVDNPSRAEVRRHLIVQEQECQCLYCGTMITTTTSELDHIVPRAGGGSSRRENLAAVCRACNAKKKRELFYAWAGPVKSQETIERVRQLKAFKDSKKAKMFKNQIRRLNQTEADEPIDERSLASTSYAAVAVRERLEQHFNEGLALDDKSRVVLDVYAGAVTRESRRAGGIDERILLRGERDKNRFDVRHHAVDAAVMTLLNRSVALTLEQRSQLRRTFYEQGLDKLDRNQLKPEEDWRDFTGLAPASQEKFLEWRKAATILGDLLAEAIEDDSIAVVSPLRLRPQNGSVHKDTVEAVLERTVGDSWTDKQVSRIVDPDTYIAFLSLLGKKKELEADHQRLVSVSAGVKLLAEERVQIFPEEAASILTPRGVVKIGDSIHHARLYGWKNQRGDIQVGMLRVFGAEFPWFMRESGVKDILRVPIPQGSQSYRDLAPTVRKNIENDKAVEFGWFTQNDELEIDPFDYIQHGGKDKLARFLSYMPESRWRIDGISMNNKLRIRPNLLSGEELPAKVYGKELSEEQYKLLEETLKTGLIIATEGLLSLKSARIVRRNNLGIPRWRGNGHLPTSLDIQRAAAQALEGRDLEHHHHHH

SEQ ID NO: 797 - protein, 1124 aa, synthetic construct
MSTDMKNYRIGVDVGDRSVGLAAIEFDDDGLPIQKLALVTFRHDGGLDPTKNKTPMSRKETRGIARRTMRMNRERKRRLRNLDNVLENLGYSVPEGPEPETYEAWTSRALLASIKLASADELNEHLVRAVRHMARHRGWANPWWSLDQLEKASQEPSETFEIILARARELFGEKVPANPTLGMLGALAANNEVLLRPRDEKKRKTGYVRGTPLMFAQVRQGDQLAELRRICEVQGIEDQYEALRLGVFDHKHPYVPKERVGKDPLNPSTNRTIRASLEFQEFRILDSVANLRVRIGSRAKRELTEAEYDAAVEFLMDYADKEQPSWADVAEKIGVPGNRLVAPVLEDVQQKTAPYDRSSAAFEKAMGKKTEARQWWESTDDDQLRSLLIAFLVDATNDTEEAAAEAGLSELYKSWPAEEREALSNIDFEKGRVAYSQETLSKLSEYMHEYRVGLHEARKAVFGVDDTWRPPLDKLEEPTGQPAVDRVLTILRRFVLDCERQWGRPRAITVEHTRTGLMGPTQRQKILNEQKKNRADNERIRDELRESGVDNPSRAEVRRHLIVQEQECQCLYCGTMITTTTSELDHIVPRAGGGSSRRENLAAVCRACNAKKKRELFYAWAGPVKSQETIERVRQLKAFKDSKKAKMFKNQIRRLNQTEADEPIDERSLASTSYAAVAVRERLEQHFNEGLALDDKSRVVLDVYAGAVTRESRRAGGIDERILLRGERDKNRFDVRHHAVDAAVMTLLNRSVALTLEQRSQLRRTFYEQGLDKLDRNQLKPEEDWRDFTGLAPASQEKFLEWRKAATILGDLLAEAIEDDSIAVVSPLRLRPQNGSVHKDTVQSLVTKRLGDSFTVEETRRVIDRKIYLSLLDELNGRGILPADQSRTASSEGLIVLTADDPIQLFPASAAMLPVQEGAVELGAIHHARVYAWKTPKGKIAYGMVRVFGGEFGRIGFRKKRVNVFTKELPIWSESWRLAEPRVTAFISNGAAKQIGWLTIGDELDFGDPDKVPGNGAIQEFLKEFPETRWQIDGFESPSTLRLRPLYLAKEGLPEVSNKAIKTIVDLPGWRPSINVALSANSLSTIRRTALGRPRWESTSLPISWSPFQKANQALLLEHHHHHH

SEQ ID NO: 798 - protein, 1195 aa, synthetic construct
MSTDMKNYRIGVDVGDRSVGLAAIEFDDDGLPIQKLALVTFRHDGGLDPTKNKTPMSRKETRGIARRTMRMNRERKRRLRNLDNVLENLGYSVPEGPEPETYEAWTSRALLASIKLASADELNEHLVRAVRHMARHRGWANPWWSLDQLEKASQEPSETFEIILARARELFGEKVPANPTLGMLGALAANNEVLLRPRDEKKRKTGYVRGTPLMFAQVRQGDQLAELRRICEVQGIEDQYEALRLGVFDHKHPYVPKERVGKDPLNPSTNRTIRASLEFQEFRILDSVANLRVRIGSRAKRELTEAEYDAAVEFLMDYADKEQPSWADVAEKIGVPGNRLVAPVLEDVQQKTAPYDRSSAAFEKAMGKKTEARQWWESTDDDQLRSLLIAFLVDATNDTEEAAAEAGLSELYKSWPAEEREALSNIDFEKGRVAYSQETLSKLSEYMHEYRVGLHEARKAVFGVDDTWRPPLDKLEEPTGQPAVDRVLTILRRFVLDCERQWGRPRAITVEHTRTGLMGPTQRQKILNEQKKNRADNERIRDELRESGVDNPSRAEVRRHLIVQEQECQCLYCGTMITTTTSELDHIVPRAGGGSSRRENLAAVCRACNAKKKRELFYAWAGPVKSQETIERVRQLKAFKDSKKAKMFKNQIRRLNQTEADEPIDERSLASTSYAAVAVRERLEQHFNEGLALDDKSRVVLDVYAGAVTRESRRAGGIDERILLRGERDKNRFDVRHHAVDAAVMTLLNRSVALTLEQRSQLRRTFYEQGLDKLDRNQLKPEEDWRDFTGLAPASQEKFLEWRKAATILGDLLAEAIEDDSIAVVSPLRLRPQNGSVHKVRGSKLIKRKLGDSFSSDEVRRVADKHFYMALLKHLEYDEKNGFKTNPGRTLVLSDGRTLGGNSVIGLYPASKSGRKPKDPSIDPNAPKVGKAAMLSVKRGASELSYVHHARVYAWETTSNSKKEEPEYSFGIVRVFAGEFPRMGFLKDGADVFTKALPEWSESYRLSDETVLSKLKSGEAKQIGWLLAGDELEFGSGFLSQIKGNNSIKAFTSTYPADNRWVVSGMPLTSSLTLSPSYLSQETLVKKSKKSSSKTTVSTTETLTRDTSDESAGDDVDDSTKTDPALKVVESGWDVKMKKIFADPDLKIIRRSILGVPRWHDTWNQEREKERLPKSWQPHLEAKRLLGLEHHHHHH

SEQ ID NO: 799 - protein, 1120 aa, synthetic construct
MSTDMKNYRIGVDVGDRSVGLAAIEFDDDGLPIQKLALVTFRHDGGLDPTKNKTPMSRKETRGIARRTMRMNRERKRRLRNLDNVLENLGYSVPEGPEPETYEAWTSRALLASIKLASADELNEHLVRAVRHMARHRGWANPWWSLDQLEKASQEPSETFEIILARARELFGEKVPANPTLGMLGALAANNEVLLRPRDEKKRKTGYVRGTPLMFAQVRQGDQLAELRRICEVQGIEDQYEALRLGVFDHKHPYVPKERVGKDPLNPSTNRTIRASLEFQEFRILDSVANLRVRIGSRAKRELTEAEYDAAVEFLMDYADKEQPSWADVAEKIGVPGNRLVAPVLEDVQQKTAPYDRSSAAFEKAMGKKTEARQWWESTDDDQLRSLLIAFLVDATNDTEEAAAEAGLSELYKSWPAEEREALSNIDFEKGRVAYSQETLSKLSEYMHEYRVGLHEARKAVFGVDDTWRPPLDKLEEPTGQPAVDRVLTILRRFVLDCERQWGRPRAITVEHTRTGLMGPTQRQKILNEQKKNRADNERIRDELRESGVDNPSRAEVRRHLIVQEQECQCLYCGTMITTTTSELDHIVPRAGGGSSRRENLAAVCRACNAKKKRELFYAWAGPVKSQETIERVRQLKAFKDSKKAKMFKNQIRRLNQTEADEPIDERSLASTSYAAVAVRERLEQHFNEGLALDDKSRVVLDVYAGAVTRESRRAGGIDERILLRGERDKNRFDVRHHAVDAAVMTLLNRSVALTLEQRSQLRRTFYEQGLDKLDRNQLKPEEDWRDFTGLAPASQEKFLEWRKAATILGDLLAEAIEDDSIAVVSPLRLRPQNGSVHADTVEPLVRKEIGEAFTKDEILRIVDRSLFLRMSSLAGDGDLDTDPQRSAELRWAPDRSVDLFPSNAAYLAVRHGAVAIGGTVKYARVYAWRTKTGFDYGMVRMYVGEFPKIGFSGPGVDIFTAPLPPYSQAIRTANPRLRKRIESGEARQIGWVATDDELELAPSEFAIGDTKMALFMQQLPESRWLITGFFNTTKFSIAPSYLASEGIDESTAESVASVVKANRIPLGVNVVLASANCTIIRRTVTGAPRWHGDGLPRSWNVREAAEQAFSSLEHHHHHH

SEQ ID NO: 800 - protein, 1133 aa, synthetic construct
MSTDMKNYRIGVDVGDRSVGLAAIEFDDDGLPIQKLALVTFRHDGGLDPTKNKTPMSRKETRGIARRTMRMNRERKRRLRNLDNVLENLGYSVPEGPEPETYEAWTSRALLASIKLASADELNEHLVRAVRHMARHRGWANPWWSLDQLEKASQEPSETFEIILARARELFGEKVPANPTLGMLGALAANNEVLLRPRDEKKRKTGYVRGTPLMFAQVRQGDQLAELRRICEVQGIEDQYEALRLGVFDHKHPYVPKERVGKDPLNPSTNRTIRASLEFQEFRILDSVANLRVRIGSRAKRELTEAEYDAAVEFLMDYADKEQPSWADVAEKIGVPGNRLVAPVLEDVQQKTAPYDRSSAAFEKAMGKKTEARQWWESTDDDQLRSLLIAFLVDATNDTEEAAAEAGLSELYKSWPAEEREALSNIDFEKGRVAYSQETLSKLSEYMHEYRVGLHEARKAVFGVDDTWRPPLDKLEEPTGQPAVDRVLTILRRFVLDCERQWGRPRAITVEHTRTGLMGPTQRQKILNEQKKNRADNERIRDELRESGVDNPSRAEVRRHLIVQEQECQCLYCGTMITTTTSELDHIVPRAGGGSSRRENLAAVCRACNAKKKRELFYAWAGPVKSQETIERVRQLKAFKDSKKAKMFKNQIRRLNQTEADEPIDERSLASTSYAAVAVRERLEQHFNEGLALDDKSRVVLDVYAGAVTRESRRAGGIDERILLRGERDKNRFDVRHHAVDAAVMTLLNRSVALTLEQRSQLRRTFYEQGLDKLDRNQLKPEEDWRDFTGLAPASQEKFLEWRKAATILGDLLAEAIEDDSIAVVSPLRLRPQNGSVHADTVQPLAYKSIGDAFSQDEVLRLLDRSLYMRLQEIAEGGDLEFDERRSELQRWASERPVALFPTSAAYLPVRGGAVTIGGTIRFAQIYAWKTKDGFNFGMVRLYVGEFPRIGFGGPGNDFLTTTPPAHSQAMRTANSALRQRIQSGDARLIGWIAVDDEIEIEPTYFQTDGTKLGEFLTLFPEKHWLITGIAEPGKIGIAPSYLAYEGVVTAADMERGGARSEHETPAAVSEVLKANRIPMSVNVILGSPGCNVLRRTVLGRPRWTGDSLPTSWNVLAAAEEAFEKLEHHHHHH

SEQ ID NO: 801 - protein, 1133 aa, synthetic construct
MSTDMKNYRIGVDVGDRSVGLAAIEFDDDGLPIQKLALVTFRHDGGLDPTKNKTPMSRKETRGIARRTMRMNRERKRRLRNLDNVLENLGYSVPEGPEPETYEAWTSRALLASIKLASADELNEHLVRAVRHMARHRGWANPWWSLDQLEKASQEPSETFEIILARARELFGEKVPANPTLGMLGALAANNEVLLRPRDEKKRKTGYVRGTPLMFAQVRQGDQLAELRRICEVQGIEDQYEALRLGVFDHKHPYVPKERVGKDPLNPSTNRTIRASLEFQEFRILDSVANLRVRIGSRAKRELTEAEYDAAVEFLMDYADKEQPSWADVAEKIGVPGNRLVAPVLEDVQQKTAPYDRSSAAFEKAMGKKTEARQWWESTDDDQLRSLLIAFLVDATNDTEEAAAEAGLSELYKSWPAEEREALSNIDFEKGRVAYSQETLSKLSEYMHEYRVGLHEARKAVFGVDDTWRPPLDKLEEPTGQPAVDRVLTILRRFVLDCERQWGRPRAITVEHTRTGLMGPTQRQKILNEQKKNRADNERIRDELRESGVDNPSRAEVRRHLIVQEQECQCLYCGTMITTTTSELDHIVPRAGGGSSRRENLAAVCRACNAKKKRELFYAWAGPVKSQETIERVRQLKAFKDSKKAKMFKNQIRRLNQTEADEPIDERSLASTSYAAVAVRERLEQHFNEGLALDDKSRVVLDVYAGAVTRESRRAGGIDERILLRGERDKNRFDVRHHAVDAAVMTLLNRSVALTLEQRSQLRRTFYEQGLDKLDRNQLKPEEDWRDFTGLAPASQEKFLEWRKAATILGDLLAEAIEDDSIAVVSPLRLRPQNGSVHEDGRAPHARRRLGAAWTSVDRARIVDDRVYEALSAGLQAGDPLPEDDARTLRLPSGRMLTADDEIFIFPDGSARHPLPNASSAPLGGSVHHARLFRWPGKGGAWNAGIVRVFASDLYDLEGGVEGPILSAPLLARSRAVRRSQLPVREAIERGIAEQVGSFVIGDEIEIVPSEWGTSGKAGEFFARFPERRWRLTGWEQEGVLNLRPMYLALEGATLASDDEEPDSRLVRISRTEEDIIKRTLRVAPSWLWKTPSTRVVRRTALGEPREATTGVPMSWSPHRAVFGDLEHHHHHH

SEQ ID NO: 802 - protein, 1136 aa, synthetic construct
MSTDMKNYRIGVDVGDRSVGLAAIEFDDDGLPIQKLALVTFRHDGGLDPTKNKTPMSRKETRGIARRTMRMNRERKRRLRNLDNVLENLGYSVPEGPEPETYEAWTSRALLASIKLASADELNEHLVRAVRHMARHRGWANPWWSLDQLEKASQEPSETFEIILARARELFGEKVPANPTLGMLGALAANNEVLLRPRDEKKRKTGYVRGTPLMFAQVRQGDQLAELRRICEVQGIEDQYEALRLGVFDHKHPYVPKERVGKDPLNPSTNRTIRASLEFQEFRILDSVANLRVRIGSRAKRELTEAEYDAAVEFLMDYADKEQPSWADVAEKIGVPGNRLVAPVLEDVQQKTAPYDRSSAAFEKAMGKKTEARQWWESTDDDQLRSLLIAFLVDATNDTEEAAAEAGLSELYKSWPAEEREALSNIDFEKGRVAYSQETLSKLSEYMHEYRVGLHEARKAVFGVDDTWRPPLDKLEEPTGQPAVDRVLTILRRFVLDCERQWGRPRAITVEHTRTGLMGPTQRQKILNEQKKNRADNERIRDELRESGVDNPSRAEVRRHLIVQEQECQCLYCGTMITTTTSELDHIVPRAGGGSSRRENLAAVCRACNAKKKRELFYAWAGPVKSQETIERVRQLKAFKDSKKAKMFKNQIRRLNQTEADEPIDERSLASTSYAAVAVRERLEQHFNEGLALDDKSRVVLDVYAGAVTRESRRAGGIDERILLRGERDKNRFDVRHHAVDAAVMTLLNRSVALTLEQRSQLRRTFYEQGLDKLDRNQLKPEEDWRDFTGLAPASQEKFLEWRKAATILGDLLAEAIEDDSIAVVSPLRLRPQNGSVHEDGRAPHQTKRVGDAWTSAERALIVDDRVYEAISGGALPSADLPEDSNRSIRLPNGRRLDAEGKVFIFPDTAARLPLPNQSSARLGQSIHHARLYRWRDARGRVAGGVIRVWAADLYDLDGGVRADLLTAALRPSSRAVRRAKNVKLRDALVQGIAEHVGTFVVGDEILIDPAEWAGDNEPGRFLAEWPERHWRLAGLMSDSQFTMTPMYLSQEGVVREEEFDPDEHRRIVPVSADAFKVISDRLRISASSLWSTESTRVIRRTGSGAVREAPDRGLPASWSPYLAVHGSLEHHHHHH

SEQ ID NO: 803 - protein, 1143 aa, synthetic construct
MSTDMKNYRIGVDVGDRSVGLAAIEFDDDGLPIQKLALVTFRHDGGLDPTKNKTPMSRKETRGIARRTMRMNRERKRRLRNLDNVLENLGYSVPEGPEPETYEAWTSRALLASIKLASADELNEHLVRAVRHMARHRGWANPWWSLDQLEKASQEPSETFEIILARARELFGEKVPANPTLGMLGALAANNEVLLRPRDEKKRKTGYVRGTPLMFAQVRQGDQLAELRRICEVQGIEDQYEALRLGVFDHKHPYVPKERVGKDPLNPSTNRTIRASLEFQEFRILDSVANLRVRIGSRAKRELTEAEYDAAVEFLMDYADKEQPSWADVAEKIGVPGNRLVAPVLEDVQQKTAPYDRSSAAFEKAMGKKTEARQWWESTDDDQLRSLLIAFLVDATNDTEEAAAEAGLSELYKSWPAEEREALSNIDFEKGRVAYSQETLSKLSEYMHEYRVGLHEARKAVFGVDDTWRPPLDKLEEPTGQPAVDRVLTILRRFVLDCERQWGRPRAITVEHTRTGLMGPTQRQKILNEQKKNRADNERIRDELRESGVDNPSRAEVRRHLIVQEQECQCLYCGTMITTTTSELDHIVPRAGGGSSRRENLAAVCRACNAKKKRELFYAWAGPVKSQETIERVRQLKAFKDSKKAKMFKNQIRRLNQTEADEPIDERSLASTSYAAVAVRERLEQHFNEGLALDDKSRVVLDVYAGAVTRESRRAGGIDERILLRGERDKNRFDVRHHAVDAAVMTLLNRSVALTLEQRSQLRRTFYEQGLDKLDRNQLKPEEDWRDFTGLAPASQEKFLEWRKAATILGDLLAEAIEDDSIAVVSPLRLRPQNGSVHDDTIFPLHKKPAREAFTPNEVLAIADPELYIAALPLLDKRGGLPKLAEREPTGTVLDDPDGVVELFPSWDKSDITPYLRVRGGAAKIGSTVHHARLYAVPSKRGPKLYQMRVFAGEFASIGFKKAGVDLFTAELPVWSQSYRAAPRALRDALEAGTAVYLGWLAPDDELEIPAEALHLVPCLAPPGDAVHGAFPLRGALREARWRVSGFEATELVNLKPALLATEEFSQADLQALTSFPGGKPYFGAQGWRLSVSKLLELRPTVVRRTASGAPRWRSEGSLPTSWRLEDVLAGVIAPLEHHHHHH

SEQ ID NO: 804 - protein, 1143 aa, synthetic construct
MSTDMKNYRIGVDVGDRSVGLAAIEFDDDGLPIQKLALVTFRHDGGLDPTKNKTPMSRKETRGIARRTMRMNRERKRRLRNLDNVLENLGYSVPEGPEPETYEAWTSRALLASIKLASADELNEHLVRAVRHMARHRGWANPWWSLDQLEKASQEPSETFEIILARARELFGEKVPANPTLGMLGALAANNEVLLRPRDEKKRKTGYVRGTPLMFAQVRQGDQLAELRRICEVQGIEDQYEALRLGVFDHKHPYVPKERVGKDPLNPSTNRTIRASLEFQEFRILDSVANLRVRIGSRAKRELTEAEYDAAVEFLMDYADKEQPSWADVAEKIGVPGNRLVAPVLEDVQQKTAPYDRSSAAFEKAMGKKTEARQWWESTDDDQLRSLLIAFLVDATNDTEEAAAEAGLSELYKSWPAEEREALSNIDFEKGRVAYSQETLSKLSEYMHEYRVGLHEARKAVFGVDDTWRPPLDKLEEPTGQPAVDRVLTILRRFVLDCERQWGRPRAITVEHTRTGLMGPTQRQKILNEQKKNRADNERIRDELRESGVDNPSRAEVRRHLIVQEQECQCLYCGTMITTTTSELDHIVPRAGGGSSRRENLAAVCRACNAKKKRELFYAWAGPVKSQETIERVRQLKAFKDSKKAKMFKNQIRRLNQTEADEPIDERSLASTSYAAVAVRERLEQHFNEGLALDDKSRVVLDVYAGAVTRESRRAGGIDERILLRGERDKNRFDVRHHAVDAAVMTLLNRSVALTLEQRSQLRRTFYEQGLDKLDRNQLKPEEDWRDFTGLAPASQEKFLEWRKAATILGDLLAEAIEDDSIAVVSPLRLRPQNGSVHDDTIFPLHKKPAREAFTPNEVLAIADPELYIAALPLLDKRGGLPKLAEREPTGTVLDDPDGVVELFPSWDKSDITPYLRVRGGAAKIGSTVHHARLYAVPSKRGPKLYQMRVFAGEFASIGFKKAGVDLFTAELPVWSQSYRAAPRALRDALEAGTAVCLGWLVPDDELEFPLEVLHLVPSLTPPAQSEGQAYPLRETICERRWRVSGFEDADRLNLKPVLLASEEFRHAELHALADAPGGKAYFGMQGWRLSVSKLVELRPTVIRRTASGTPRWRSEGSLPTSWRLEDVLAVVTAPLEHHHHHH

SEQ ID NO: 805 - protein, 1125 aa, synthetic construct
MSTDMKNYRIGVDVGDRSVGLAAIEFDDDGLPIQKLALVTFRHDGGLDPTKNKTPMSRKETRGIARRTMRMNRERKRRLRNLDNVLENLGYSVPEGPEPETYEAWTSRALLASIKLASADELNEHLVRAVRHMARHRGWANPWWSLDQLEKASQEPSETFEIILARARELFGEKVPANPTLGMLGALAANNEVLLRPRDEKKRKTGYVRGTPLMFAQVRQGDQLAELRRICEVQGIEDQYEALRLGVFDHKHPYVPKERVGKDPLNPSTNRTIRASLEFQEFRILDSVANLRVRIGSRAKRELTEAEYDAAVEFLMDYADKEQPSWADVAEKIGVPGNRLVAPVLEDVQQKTAPYDRSSAAFEKAMGKKTEARQWWESTDDDQLRSLLIAFLVDATNDTEEAAAEAGLSELYKSWPAEEREALSNIDFEKGRVAYSQETLSKLSEYMHEYRVGLHEARKAVFGVDDTWRPPLDKLEEPTGQPAVDRVLTILRRFVLDCERQWGRPRAITVEHTRTGLMGPTQRQKILNEQKKNRADNERIRDELRESGVDNPSRAEVRRHLIVQEQECQCLYCGTMITTTTSELDHIVPRAGGGSSRRENLAAVCRACNAKKKRELFYAWAGPVKSQETIERVRQLKAFKDSKKAKMFKNQIRRLNQTEADEPIDERSLASTSYAAVAVRERLEQHFNEGLALDDKSRVVLDVYAGAVTRESRRAGGIDERILLRGERDKNRFDVRHHAVDAAVMTLLNRSVALTLEQRSQLRRTFYEQGLDKLDRNQLKPEEDWRDFTGLAPASQEKFLEWRKAATILGDLLAEAIEDDSIAVVSPLRLRPQNGSVHDDTVQALVRKNLREGLSAQEVNRIADRDVWRVVRNLTTGAGDLPEKVNDPTLAKLLTDETVGLFPKKSAMLAVRNGAVAIGSTLHHVRVYRRDDGPGKPAKFSQIRVFAGEFGTLGWRKKGVNLFTEPLPNWSEAIRCGDLKLQQEIENGSASLIGWLVPGDEIEFAPGDAILPVIEPIEGVTSSPLTENRWVITGFESDSTINLAPAYLAREGIKDQDSVPPVLDGKFWRAAINKVMRARPTIIRRSATGIPRWHDLRDGLPISWKVLPDSSPALEPRLEHHHHHH

SEQ ID NO: 806 - protein, 1120 aa, synthetic construct
MSTDMKNYRIGVDVGDRSVGLAAIEFDDDGLPIQKLALVTFRHDGGLDPTKNKTPMSRKETRGIARRTMRMNRERKRRLRNLDNVLENLGYSVPEGPEPETYEAWTSRALLASIKLASADELNEHLVRAVRHMARHRGWANPWWSLDQLEKASQEPSETFEIILARARELFGEKVPANPTLGMLGALAANNEVLLRPRDEKKRKTGYVRGTPLMFAQVRQGDQLAELRRICEVQGIEDQYEALRLGVFDHKHPYVPKERVGKDPLNPSTNRTIRASLEFQEFRILDSVANLRVRIGSRAKRELTEAEYDAAVEFLMDYADKEQPSWADVAEKIGVPGNRLVAPVLEDVQQKTAPYDRSSAAFEKAMGKKTEARQWWESTDDDQLRSLLIAFLVDATNDTEEAAAEAGLSELYKSWPAEEREALSNIDFEKGRVAYSQETLSKLSEYMHEYRVGLHEARKAVFGVDDTWRPPLDKLEEPTGQPAVDRVLTILRRFVLDCERQWGRPRAITVEHTRTGLMGPTQRQKILNEQKKNRADNERIRDELRESGVDNPSRAEVRRHLIVQEQECQCLYCGTMITTTTSELDHIVPRAGGGSSRRENLAAVCRACNAKKKRELFYAWAGPVKSQETIERVRQLKAFKDSKKAKMFKNQIRRLNQTEADEPIDERSLASTSYAAVAVRERLEQHFNEGLALDDKSRVVLDVYAGAVTRESRRAGGIDERILLRGERDKNRFDVRHHAVDAAVMTLLNRSVALTLEQRSQLRRTFYEQGLDKLDRNQLKPEEDWRDFTGLAPASQEKFLEWRKAATILGDLLAEAIEDDSIAVVSPLRLRPQNGSVHADTVQKLVHKNIGKEFSSAEIDRVASYSLFDKLSHLADDSGNLPEDSARHLALKLPADFEVDLFPSSAACLAVRGGAVEIGGSIKSARVYAWKTNSGFGFGMVRVYTAEFPKIGFLKSGIDIFTAPLPANSQAMRHASAGLHRRIESGEAKQIGWIAINDEIEIKVTSFNEGEEKLPKFLQACPENRWVIKGFFSSVQISIVPSYLAAEGIDDGVPEVVQQTLREGRIPTAVNVLLSDPDTTIIRRSVLGTVRWRHDGTSSSWNPHQAAKKIFGLEHHHHHH

SEQ ID NO: 807 - protein, 1023 aa, synthetic construct
MSTDMKNYRIGVDVGDRSVGLAAIEFDDDGLPIQKLALVTFRHDGGLDPTKNKTPMSRKETRGIARRTMRMNRERKRRLRNLDNVLENLGYSVPEGPEPETYEAWTSRALLASIKLASADELNEHLVRAVRHMARHRGWANPWWSLDQLEKASQEPSETFEIILARARELFGEKVPANPTLGMLGALAANNEVLLRPRDEKKRKTGYVRGTPLMFAQVRQGDQLAELRRICEVQGIEDQYEALRLGVFDHKHPYVPKERVGKDPLNPSTNRTIRASLEFQEFRILDSVANLRVRIGSRAKRELTEAEYDAAVEFLMDYADKEQPSWADVAEKIGVPGNRLVAPVLEDVQQKTAPYDRSSAAFEKAMGKKTEARQWWESTDDDQLRSLLIAFLVDATNDTEEAAAEAGLSELYKSWPAEEREALSNIDFEKGRVAYSQETLSKLSEYMHEYRVGLHEARKAVFGVDDTWRPPLDKLEEPTGQPAVDRVLTILRRFVLDCERQWGRPRAITVEHTRTGLMGPTQRQKILNEQKKNRADNERIRDELRESGVDNPSRAEVRRHLIVQEQECQCLYCGTMITTTTSELDHIVPRAGGGSSRRENLAAVCRACNAKKKRELFYAWAGPVKSQETIERVRQLKAFKDSKKAKMFKNQIRRLNQTEADEPIDERSLASTSYAAVAVRERLEQHFNEGLALDDKSRVVLDVYAGAVTRESRRAGGIDERILLRGERDKNRFDVRHHAVDAAVMTLLNRSVALTLEQRSQLRRTFYEQGLDKLDRNQLKPEEDWRDFTGLAPASQEKFLEWRKAATILGDLLAEAIEDDSIAVVSPLRLRPQNGSVHMVTEIECGKEDDVISETYREKLKEAFKRFDTKKGKCLTDKEAKEAGFCIKKNELVMSLKCSIKGTGPGQMIRINNNVFKTNVHNVGVDVYLDEKGKKKAYERKNPRLSKHFIEPPPQPNGRVSFTLKRRDMVTVEGEDAIYRIKKLGTSPTIEAVVGSDGKTRTVSATKLTKANSAELEHHHHHH

SEQ ID NO: 808 - protein, 1128 aa, synthetic construct
MSTDMKNYRIGVDVGDRSVGLAAIEFDDDGLPIQKLALVTFRHDGGLDPTKNKTPMSRKETRGIARRTMRMNRERKRRLRNLDNVLENLGYSVPEGPEPETYEAWTSRALLASIKLASADELNEHLVRAVRHMARHRGWANPWWSLDQLEKASQEPSETFEIILARARELFGEKVPANPTLGMLGALAANNEVLLRPRDEKKRKTGYVRGTPLMFAQVRQGDQLAELRRICEVQGIEDQYEALRLGVFDHKHPYVPKERVGKDPLNPSTNRTIRASLEFQEFRILDSVANLRVRIGSRAKRELTEAEYDAAVEFLMDYADKEQPSWADVAEKIGVPGNRLVAPVLEDVQQKTAPYDRSSAAFEKAMGKKTEARQWWESTDDDQLRSLLIAFLVDATNDTEEAAAEAGLSELYKSWPAEEREALSNIDFEKGRVAYSQETLSKLSEYMHEYRVGLHEARKAVFGVDDTWRPPLDKLEEPTGQPAVDRVLTILRRFVLDCERQWGRPRAITVEHTRTGLMGPTQRQKILNEQKKNRADNERIRDELRESGVDNPSRAEVRRHLIVQEQECQCLYCGTMITTTTSELDHIVPRAGGGSSRRENLAAVCRACNAKKKRELFYAWAGPVKSQETIERVRQLKAFKDSKKAKMFKNQIRRLNQTEADEPIDERSLASTSYAAVAVRERLEQHFNEGLALDDKSRVVLDVYAGAVTRESRRAGGIDERILLRGERDKNRFDVRHHAVDAAVMTLLNRSVALTLEQRSQLRRAFYEQGLDKLDRDQLKPEEDWRNFIGLSLASQEKFLEWKKVTTVLGDLLAEAIEDDSIAVVSPLRLRPQNGRVHKDTIAAVKKQTLGSAWSADAVKRIVDPEIYLAMKDALGKSKVLPEDSARTLELSDGRYLEADDEVLFFPKNAASILTPRGVAEIGAGTHHARLLTWDDPKKGPQLGIQRVFAAEFGEILKDASSNDLFEAPIPFHTMSHRDLQPKVRAAVEQGLTRQIGWITQGDELEIDPADFVGEANAFGNFLREFPERSWSIAGLKKSNTIVIRPLLLSQEGVTAAISPHAAKIVENGIELSNSTLFTAPGTGIIRRTGLGRPRWDSGPAHLPESFNVHARMTQQSARDLEHHHHHH

SEQ ID NO: 809 - protein, 1139 aa, synthetic construct
MSTDMKNYRIGVDVGDRSVGLAAIEFDDDGLPIQKLALVTFRHDGGLDPTKNKTPMSRKETRGIARRTMRMNRERKRRLRNLDNVLENLGYSVPEGPEPETYEAWTSRALLASIKLASADELNEHLVRAVRHMARHRGWANPWWSLDQLEKASQEPSETFEIILARARELFGEKVPANPTLGMLGALAANNEVLLRPRDEKKRKTGYVRGTPLMFAQVRQGDQLAELRRICEVQGIEDQYEALRLGVFDHKHPYVPKERVGKDPLNPSTNRTIRASLEFQEFRILDSVANLRVRIGSRAKRELTEAEYDAAVEFLMDYADKEQPSWADVAEKIGVPGNRLVAPVLEDVQQKTAPYDRSSAAFEKAMGKKTEARQWWESTDDDQLRSLLIAFLVDATNDTEEAAAEAGLSELYKSWPAEEREALSNIDFEKGRVAYSQETLSKLSEYMHEYRVGLHEARKAVFGVDDTWRPPLDKLEEPTGQPAVDRVLTILRRFVLDCERQWGRPRAITVEHTRTGLMGPTQRQKILNEQKKNRADNERIRDELRESGVDNPSRAEVRRHLIVQEQECQCLYCGTMITTTTSELDHIVPRAGGGSSRRENLAAVCRACNAKKKRELFYAWAGPVKSQETIERVRQLKAFKDSKKAKMFKNQIRRLNQTEADEPIDERSLASTSYAAVAVRERLEQHFNEGLALDDKSRVVLDVYAGAVTRESRRAGGIDERILLRGERDKNRFDVRHHAVDAAVMTLLNRSVALTLEQRSQLRRAFYEQGLDKLDRDQLKPEEDWRNFIGLSLASQEKFLEWKKVTTVLGDLLAEAIEDDSIAVVSPLRLRPQNGRVHKDTIAAVKKQTLGSAWSADAVKRIVDPEIYLAMKDALGKSKVLPEDSARTLELSDGRYLEADDEVLFFPKNAASILTPRGVAEIGGSIHHARVYAWMGAKGQLEYGMMRVFGAEFPTLTKLSGSKDILRMPIHAGSMSYRDMQDRVRKPIESDIAVELGWITQGDELEILPEAHLETAGGLGDFLKSFPETQWTIDGFNDPSRLRVRPRLMSLEGRDTIDAMGHLSDTEKLKIKQALSKGLMVSASELLSHGAKIIRRDHLGRPRWRGNARPVSIELEQVANQLVNHRSVDGQLEHHHHHH

SEQ ID NO: 810 - protein, 1139 aa, synthetic construct
MSTDMKNYRIGVDVGDRSVGLAAIEFDDDGLPIQKLALVTFRHDGGLDPTKNKTPMSRKETRGIARRTMRMNRERKRRLRNLDNVLENLGYSVPEGPEPETYEAWTSRALLASIKLASADELNEHLVRAVRHMARHRGWANPWWSLDQLEKASQEPSETFEIILARARELFGEKVPANPTLGMLGALAANNEVLLRPRDEKKRKTGYVRGTPLMFAQVRQGDQLAELRRICEVQGIEDQYEALRLGVFDHKHPYVPKERVGKDPLNPSTNRTIRASLEFQEFRILDSVANLRVRIGSRAKRELTEAEYDAAVEFLMDYADKEQPSWADVAEKIGVPGNRLVAPVLEDVQQKTAPYDRSSAAFEKAMGKKTEARQWWESTDDDQLRSLLIAFLVDATNDTEEAAAEAGLSELYKSWPAEEREALSNIDFEKGRVAYSQETLSKLSEYMHEYRVGLHEARKAVFGVDDTWRPPLDKLEEPTGQPAVDRVLTILRRFVLDCERQWGRPRAITVEHTRTGLMGPTQRQKILNEQKKNRADNERIRDELRESGVDNPSRAEVRRHLIVQEQECQCLYCGTMITTTTSELDHIVPRAGGGSSRRENLAAVCRACNAKKKRELFYAWAGPVKSQETIERVRQLKAFKDSKKAKMFKNQIRRLNQTEADEPIDERSLASTSYAAVAVRERLEQHFNEGLALDDKSRVVLDVYAGAVTRESRRAGGIDERILLRGERDKNRFDVRHHAVDAAVMTLLNRSVALTLEQRSQLRRAFYEQGLDKLDRDQLKPEEDWRNFIGLSLASQEKFLEWKKVTTVLGDLLAEAIEDDSIAVVSPLRLRPQNGRVHKDTIAAVKKQTLGSAWSADAVKRIVDPEIYLAMKDALGKSKVLPEDSARTLELSDGRYLEADDEVLFFPKNAASILTPRGVAEIGDSIHHARLYGWKNQRGDIQVGMLRVFGAEFPWFMRESGVKDILRVPIPQGSQSYRDLAATTRKFIENGQATEFGWITQNDEIEISAEEYLATDKGDILSDFLGILPEIRWKVTGIEDNRRIRLRPLLLSSEAIPNMLNGRLLTQEEHDLIALVINKGVRVVVSTFLALPSTKIIRRNNLGIPRWRGNGHLPTSLDIQRAATQALEGRDLEHHHHHH

SEQ ID NO: 811 - protein, 1142 aa, synthetic construct
MSTDMKNYRIGVDVGDRSVGLAAIEFDDDGLPIQKLALVTFRHDGGLDPTKNKTPMSRKETRGIARRTMRMNRERKRRLRNLDNVLENLGYSVPEGPEPETYEAWTSRALLASIKLASADELNEHLVRAVRHMARHRGWANPWWSLDQLEKASQEPSETFEIILARARELFGEKVPANPTLGMLGALAANNEVLLRPRDEKKRKTGYVRGTPLMFAQVRQGDQLAELRRICEVQGIEDQYEALRLGVFDHKHPYVPKERVGKDPLNPSTNRTIRASLEFQEFRILDSVANLRVRIGSRAKRELTEAEYDAAVEFLMDYADKEQPSWADVAEKIGVPGNRLVAPVLEDVQQKTAPYDRSSAAFEKAMGKKTEARQWWESTDDDQLRSLLIAFLVDATNDTEEAAAEAGLSELYKSWPAEEREALSNIDFEKGRVAYSQETLSKLSEYMHEYRVGLHEARKAVFGVDDTWRPPLDKLEEPTGQPAVDRVLTILRRFVLDCERQWGRPRAITVEHTRTGLMGPTQRQKILNEQKKNRADNERIRDELRESGVDNPSRAEVRRHLIVQEQECQCLYCGTMITTTTSELDHIVPRAGGGSSRRENLAAVCRACNAKKKRELFYAWAGPVKSQETIERVRQLKAFKDSKKAKMFKNQIRRLNQTEADEPIDERSLASTSYAAVAVRERLEQHFNEGLALDDKSRVVLDVYAGAVTRESRRAGGIDERILLRGERDKNRFDVRHHAVDAAVMTLLNRSVALTLEQRSQLRRAFYEQGLDKLDRDQLKPEEDWRNFIGLSLASQEKFLEWKKVTTVLGDLLAEAIEDDSIAVVSPLRLRPQNGRVHKDTIAAVKKQTLGSAWSADAVKRIVDPEIYLAMKDALGKSKVLPEDSARTLELSDGRYLEADDEVLFFPKNAASILTPRGVAEIGNSIHHARLYSWLTKKGELKFGMLRVYGAEFPWLMRESGSRDVLHMPIHPGSQSFRGMQDGVRKAVESGEAVEFGWITQDDELEFDPEDYIAHGGDDELNRLLRVMPERRWRVDGFYNAGTLRIRPALLSAEQLPSELQKKVADKTLSDVELILLRAVQRGLFVAISSFLPLESLKVIRRNNLGFPRWRGNGNLPTSFEVRSSALRALGVEGLEHHHHHH

SEQ ID NO: 812 - protein, 1142 aa, synthetic construct
MSTDMKNYRIGVDVGDRSVGLAAIEFDDDGLPIQKLALVTFRHDGGLDPTKNKTPMSRKETRGIARRTMRMNRERKRRLRNLDNVLENLGYSVPEGPEPETYEAWTSRALLASIKLASADELNEHLVRAVRHMARHRGWANPWWSLDQLEKASQEPSETFEIILARARELFGEKVPANPTLGMLGALAANNEVLLRPRDEKKRKTGYVRGTPLMFAQVRQGDQLAELRRICEVQGIEDQYEALRLGVFDHKHPYVPKERVGKDPLNPSTNRTIRASLEFQEFRILDSVANLRVRIGSRAKRELTEAEYDAAVEFLMDYADKEQPSWADVAEKIGVPGNRLVAPVLEDVQQKTAPYDRSSAAFEKAMGKKTEARQWWESTDDDQLRSLLIAFLVDATNDTEEAAAEAGLSELYKSWPAEEREALSNIDFEKGRVAYSQETLSKLSEYMHEYRVGLHEARKAVFGVDDTWRPPLDKLEEPTGQPAVDRVLTILRRFVLDCERQWGRPRAITVEHTRTGLMGPTQRQKILNEQKKNRADNERIRDELRESGVDNPSRAEVRRHLIVQEQECQCLYCGTMITTTTSELDHIVPRAGGGSSRRENLAAVCRACNAKKKRELFYAWAGPVKSQETIERVRQLKAFKDSKKAKMFKNQIRRLNQTEADEPIDERSLASTSYAAVAVRERLEQHFNEGLALDDKSRVVLDVYAGAVTRESRRAGGIDERILLRGERDKNRFDVRHHAVDAAVMTLLNRSVALTLEQRSQLRRAFYEQGLDKLDRDQLKPEEDWRNFIGLSLASQEKFLEWKKVTTVLGDLLAEAIEDDSIAVVSPLRLRPQNGRVHKDTIAAVKKQTLGSAWSADAVKRIVDPEIYLAMKDALGKSKVLPEDSARTLELSDGRYLEADDEVLFFPKNAASILTPRGVAEIGGSIHHARLYGWLTKKGELKVGMLRVYGAEFPWLMRESGSRNVLSMPIHRGSQSFRDMQDTTRKAVESGEAVEFAWITQNDELEFDPDDYIAHGGKDELRQFLGFMPECRWRVDGFKKNYQIRIRPAMLSREQLPSDIQRRLESKTLTKNESLLLKALDTGLVVAIGGLLPLETLKVIRRNNLGFPRWRGNGNLPTSFEVRSSALRALGVEGLEHHHHHH

SEQ ID NO: 813 - protein, 1135 aa, synthetic construct
MSTDMKNYRIGVDVGDRSVGLAAIEFDDDGLPIQKLALVTFRHDGGLDPTKNKTPMSRKETRGIARRTMRMNRERKRRLRNLDNVLENLGYSVPEGPEPETYEAWTSRALLASIKLASADELNEHLVRAVRHMARHRGWANPWWSLDQLEKASQEPSETFEIILARARELFGEKVPANPTLGMLGALAANNEVLLRPRDEKKRKTGYVRGTPLMFAQVRQGDQLAELRRICEVQGIEDQYEALRLGVFDHKHPYVPKERVGKDPLNPSTNRTIRASLEFQEFRILDSVANLRVRIGSRAKRELTEAEYDAAVEFLMDYADKEQPSWADVAEKIGVPGNRLVAPVLEDVQQKTAPYDRSSAAFEKAMGKKTEARQWWESTDDDQLRSLLIAFLVDATNDTEEAAAEAGLSELYKSWPAEEREALSNIDFEKGRVAYSQETLSKLSEYMHEYRVGLHEARKAVFGVDDTWRPPLDKLEEPTGQPAVDRVLTILRRFVLDCERQWGRPRAITVEHTRTGLMGPTQRQKILNEQKKNRADNERIRDELRESGVDNPSRAEVRRHLIVQEQECQCLYCGTMITTTTSELDHIVPRAGGGSSRRENLAAVCRACNAKKKRELFYAWAGPVKSQETIERVRQLKAFKDSKKAKMFKNQIRRLNQTEADEPIDERSLASTSYAAVAVRERLEQHFNEGLALDDKSRVVLDVYAGAVTRESRRAGGIDERILLRGERDKNRFDVRHHAVDAAVMTLLNRSVALTLEQRSQLRRAFYEQGLDKLDRDQLKPEEDWRNFIGLSLASQEKFLEWKKVTTVLGDLLAEAIEDDSIAVVSPLRLRPQNGRVHKDTIAAVKKQTLGSAWSADAVKRIVDPEIYLAMKDALGKSKVLPEDSARTLELSDGRYLEADDEVLFFPKNAASILTPRGVAEIGESVHHVRLYAWKNRKGKAEVGMLRVFGAEFPWLMRESGVKDVLRVPIHTGSQSYRDLSFTVRKNIEKGEAAEIGWLTQNEELEFNPESYLQEGGKDKLAKFLAFLPETRWRVDGFPMPDKLRIRPALLSREEIPEGVFRTEEQSLLEEALTKGLIIATKGLLSLPDVKVLRRNNLGIPRWRGGSYRPVSLDIQRAALAALDEQELEHHHHHH

SEQ ID NO: 814 - protein, 1142 aa, synthetic construct; identical to SEQ ID NO: 812

SEQ ID NO: 815 - protein, 1142 aa, synthetic construct
MSTDMKNYRIGVDVGDRSVGLAAIEFDDDGLPIQKLALVTFRHDGGLDPTKNKTPMSRKETRGIARRTMRMNRERKRRLRNLDNVLENLGYSVPEGPEPETYEAWTSRALLASIKLASADELNEHLVRAVRHMARHRGWANPWWSLDQLEKASQEPSETFEIILARARELFGEKVPANPTLGMLGALAANNEVLLRPRDEKKRKTGYVRGTPLMFAQVRQGDQLAELRRICEVQGIEDQYEALRLGVFDHKHPYVPKERVGKDPLNPSTNRTIRASLEFQEFRILDSVANLRVRIGSRAKRELTEAEYDAAVEFLMDYADKEQPSWADVAEKIGVPGNRLVAPVLEDVQQKTAPYDRSSAAFEKAMGKKTEARQWWESTDDDQLRSLLIAFLVDATNDTEEAAAEAGLSELYKSWPAEEREALSNIDFEKGRVAYSQETLSKLSEYMHEYRVGLHEARKAVFGVDDTWRPPLDKLEEPTGQPAVDRVLTILRRFVLDCERQWGRPRAITVEHTRTGLMGPTQRQKILNEQKKNRADNERIRDELRESGVDNPSRAEVRRHLIVQEQECQCLYCGTMITTTTSELDHIVPRAGGGSSRRENLAAVCRACNAKKKRELFYAWAGPVKSQETIERVRQLKAFKDSKKAKMFKNQIRRLNQTEADEPIDERSLASTSYAAVAVRERLEQHFNEGLALDDKSRVVLDVYAGAVTRESRRAGGIDERILLRGERDKNRFDVRHHAVDAAVMTLLNRSVALTLEQRSQLRRAFYEQGLDKLDRDQLKPEEDWRNFIGLSLASQEKFLEWKKVTTVLGDLLAEAIEDDSIAVVSPLRLRPQNGRVHKDTIAAVKKQTLGSAWSADAVKRIVDPEIYLAMKDALGKSKVLPEDSARTLELSDGRYLEADDEVLFFPKNAASILTPRGVAEIGESIHHARLYGWLTKKGELKVGMLRVYGAEFPWLMRESGSRDVLRMPIHPGSQSFRGMQDGVRKMVESGEAVEFGWITQNDELEFEPADYITHIRKNKLGQFLELMPEKRWRVDGFNDAGRLKIRPALLSWEQLPDEIQDKMNAGTLNEDEKNLFKIVKEGTLVSVGDFFQLETSKVIRRNNLGFPRWRGNGSLPTSFEVRFSALRALGVEGLEHHHHHH

SEQ ID NO: 816 - protein, 1135 aa, synthetic construct
MSTDMKNYRIGVDVGDRSVGLAAIEFDDDGLPIQKLALVTFRHDGGLDPTKNKTPMSRKETRGIARRTMRMNRERKRRLRNLDNVLENLGYSVPEGPEPETYEAWTSRALLASIKLASADELNEHLVRAVRHMARHRGWANPWWSLDQLEKASQEPSETFEIILARARELFGEKVPANPTLGMLGALAANNEVLLRPRDEKKRKTGYVRGTPLMFAQVRQGDQLAELRRICEVQGIEDQYEALRLGVFDHKHPYVPKERVGKDPLNPSTNRTIRASLEFQEFRILDSVANLRVRIGSRAKRELTEAEYDAAVEFLMDYADKEQPSWADVAEKIGVPGNRLVAPVLEDVQQKTAPYDRSSAAFEKAMGKKTEARQWWESTDDDQLRSLLIAFLVDATNDTEEAAAEAGLSELYKSWPAEEREALSNIDFEKGRVAYSQETLSKLSEYMHEYRVGLHEARKAVFGVDDTWRPPLDKLEEPTGQPAVDRVLTILRRFVLDCERQWGRPRAITVEHTRTGLMGPTQRQKILNEQKKNRADNERIRDELRESGVDNPSRAEVRRHLIVQEQECQCLYCGTMITTTTSELDHIVPRAGGGSSRRENLAAVCRACNAKKKRELFYAWAGPVKSQETIERVRQLKAFKDSKKAKMFKNQIRRLNQTEADEPIDERSLASTSYAAVAVRERLEQHFNEGLALDDKSRVVLDVYAGAVTRESRRAGGIDERILLRGERDKNRFDVRHHAVDAAVMTLLNRSVALTLEQRSQLRRAFYEQGLDKLDRDQLKPEEDWRNFIGLSLASQEKFLEWKKVTTVLGDLLAEAIEDDSIAVVSPLRLRPQNGRVHKDTIAAVKKQTLGSAWSADAVKRIVDPEIYLAMKDALGKSKVLPEDSARTLELSDGRYLEADDEVLFFPKNAASILTPRGVAEIGESVHHVRLYAWKNRKGKAEVGMLRVFGAEFPWLMRESGVKDVLRVPIHTGSQSYRDLSFTVRKNIEKGEAVEIGWLTQNEELEFNPESYLQEGGKDKLAKFLAFLPETRWRVDGFPMPDKLRIRPALLSREEIPEGVFGIEAQSLLEEALTKGLIIATKGLLSLPDVKVLRRNNLGIPRWRGGSYRPVSLDIQRAALAALDEQELEHHHHHH

SEQ ID NO: 817 - protein, 1142 aa, synthetic construct
MSTDMKNYRIGVDVGDRSVGLAAIEFDDDGLPIQKLALVTFRHDGGLDPTKNKTPMSRKETRGIARRTMRMNRERKRRLRNLDNVLENLGYSVPEGPEPETYEAWTSRALLASIKLASADELNEHLVRAVRHMARHRGWANPWWSLDQLEKASQEPSETFEIILARARELFGEKVPANPTLGMLGALAANNEVLLRPRDEKKRKTGYVRGTPLMFAQVRQGDQLAELRRICEVQGIEDQYEALRLGVFDHKHPYVPKERVGKDPLNPSTNRTIRASLEFQEFRILDSVANLRVRIGSRAKRELTEAEYDAAVEFLMDYADKEQPSWADVAEKIGVPGNRLVAPVLEDVQQKTAPYDRSSAAFEKAMGKKTEARQWWESTDDDQLRSLLIAFLVDATNDTEEAAAEAGLSELYKSWPAEEREALSNIDFEKGRVAYSQETLSKLSEYMHEYRVGLHEARKAVFGVDDTWRPPLDKLEEPTGQPAVDRVLTILRRFVLDCERQWGRPRAITVEHTRTGLMGPTQRQKILNEQKKNRADNERIRDELRESGVDNPSRAEVRRHLIVQEQECQCLYCGTMITTTTSELDHIVPRAGGGSSRRENLAAVCRACNAKKKRELFYAWAGPVKSQETIERVRQLKAFKDSKKAKMFKNQIRRLNQTEADEPIDERSLASTSYAAVAVRERLEQHFNEGLALDDKSRVVLDVYAGAVTRESRRAGGIDERILLRGERDKNRFDVRHHAVDAAVMTLLNRSVALTLEQRSQLRRAFYEQGLDKLDRDQLKPEEDWRNFIGLSLASQEKFLEWKKVTTVLGDLLAEAIEDDSIAVVSPLRLRPQNGRVHKDTIAAVKKQTLGSAWSADAVKRIVDPEIYLAMKDALGKSKVLPEDSARTLELSDGRYLEADDEVLFFPKNAASILTPRGVAEIGESIHHARLYGWLTKKGELKVGMLRVYGAEFPWLMRESGSRNVLSMPIHPGSQSFRGMQDGVRKVVESGEAVEFAWITQNDELEFDPADYIAHGGKDGLRQFLEFMPESRWRVDGLTTNYQLLLRPAMLSREQLPSDLQEKMVAKTLTEDETLLLKALERGLSIAVNSVLPLESLKVIRRNNLGFPRWRGNGNLPTSFEVRSSALRALGVEGLEHHHHHH

SEQ ID NO: 818 - protein, 1125 aa, synthetic construct
MSTDMKNYRIGVDVGDRSVGLAAIEFDDDGLPIQKLALVTFRHDGGLDPTKNKTPMSRKETRGIARRTMRMNRERKRRLRNLDNVLENLGYSVPEGPEPETYEAWTSRALLASIKLASADELNEHLVRAVRHMARHRGWANPWWSLDQLEKASQEPSETFEIILARARELFGEKVPANPTLGMLGALAANNEVLLRPRDEKKRKTGYVRGTPLMFAQVRQGDQLAELRRICEVQGIEDQYEALRLGVFDHKHPYVPKERVGKDPLNPSTNRTIRASLEFQEFRILDSVANLRVRIGSRAKRELTEAEYDAAVEFLMDYADKEQPSWADVAEKIGVPGNRLVAPVLEDVQQKTAPYDRSSAAFEKAMGKKTEARQWWESTDDDQLRSLLIAFLVDATNDTEEAAAEAGLSELYKSWPAEEREALSNIDFEKGRVAYSQETLSKLSEYMHEYRVGLHEARKAVFGVDDTWRPPLDKLEEPTGQPAVDRVLTILRRFVLDCERQWGRPRAITVEHTRTGLMGPTQRQKILNEQKKNRADNERIRDELRESGVDNPSRAEVRRHLIVQEQECQCLYCGTMITTTTSELDHIVPRAGGGSSRRENLAAVCRACNAKKKRELFYAWAGPVKSQETIERVRQLKAFKDSKKAKMFKNQIRRLNQTEADEPIDERSLASTSYAAVAVRERLEQHFNEGLALDDKSRVVLDVYAGAVTRESRRAGGIDERILLRGERDKNRFDVRHHAVDAAVMTLLNRSVALTLEQRSQLRRAFYEQGLDKLDRDQLKPEEDWRNFIGLSLASQEKFLEWKKVTTVLGDLLAEAIEDDSIAVVSPLRLRPQNGRVHKDTIAAVKKQTLGSAWSADAVKRIVDPEIYLAMKDALGKSKVLPEDSARTLELSDGRYLEADDEVLFFPKNAASILTPRGVAEIGESIHHARLFAWRGRRGAIEMGMVRVFTAELPYILKNSTHGDVLTATIPASTFSFRNTPATLRKKLLAGEAVSVGWLTQNDEIEIEVDEFACGNTSFAKFLTEIPEKRWRVDGFYDNRRLRIRPAYLSAEGLTDNHSKVVHETLEKGQFVNAGALLSASRTLLIRRTALGAPRWKLDSSGLPVSFSPLKLAEEALLEHHHHHH

SEQ ID NO: 819 - protein, 1139 aa, synthetic construct
MSTDMKNYRIGVDVGDRSVGLAAIEFDDDGLPIQKLALVTFRHDGGLDPTKNKTPMSRKETRGIARRTMRMNRERKRRLRNLDNVLENLGYSVPEGPEPETYEAWTSRALLASIKLASADELNEHLVRAVRHMARHRGWANPWWSLDQLEKASQEPSETFEIILARARELFGEKVPANPTLGMLGALAANNEVLLRPRDEKKRKTGYVRGTPLMFAQVRQGDQLAELRRICEVQGIEDQYEALRLGVFDHKHPYVPKERVGKDPLNPSTNRTIRASLEFQEFRILDSVANLRVRIGSRAKRELTEAEYDAAVEFLMDYADKEQPSWADVAEKIGVPGNRLVAPVLEDVQQKTAPYDRSSAAFEKAMGKKTEARQWWESTDDDQLRSLLIAFLVDATNDTEEAAAEAGLSELYKSWPAEEREALSNIDFEKGRVAYSQETLSKLSEYMHEYRVGLHEARKAVFGVDDTWRPPLDKLEEPTGQPAVDRVLTILRRFVLDCERQWGRPRAITVEHTRTGLMGPTQRQKILNEQKKNRADNERIRDELRESGVDNPSRAEVRRHLIVQEQECQCLYCGTMITTTTSELDHIVPRAGGGSSRRENLAAVCRACNAKKKRELFYAWAGPVKSQETIERVRQLKAFKDSKKAKMFKNQIRRLNQTEADEPIDERSLASTSYAAVAVRERLEQHFNEGLALDDKSRVVLDVYAGAVTRESRRAGGIDERILLRGERDKNRFDVRHHAVDAAVMTLLNRSVALTLEQRSQLRRAFYEQGLDKLDRDQLKPEEDWRNFIGLSLASQEKFLEWKKVTTVLGDLLAEAIEDDSIAVVSPLRLRPQNGRVHKDTIAAVKKQTLGSAWSADAVKRIVDPEIYLAMKDALGKSKVLPEDSARTLELSDGRYLEADDEVLFFPKNAASILTPRGVAEIGESVHHVRLYAWKNRKGKAEVGMLRVFGAEFPWLMRESGVKDVLRVPIHTGSQSYRDLSDTVCKHIEQGVAQEIGWVTQNDELEFDPDDYLQNGGKDKLAKFLSFMPENRWRIDGFQTSTKLRIRPALLSWEELPTRLYGKELAENQYALLEESLKTGLIIATKGLLSLESSKIIRRNNLGIPRWRGGSYRPVSLDIQRAALAALDEQELEHHHHHH

SEQ ID NO: 820 - protein, 1136 aa, synthetic construct
MSTDMKNYRIGVDVGDRSVGLAAIEFDDDGLPIQKLALVTFRHDGGLDPTKNKTPMSRKETRGIARRTMRMNRERKRRLRNLDNVLENLGYSVPEGPEPETYEAWTSRALLASIKLASADELNEHLVRAVRHMARHRGWANPWWSLDQLEKASQEPSETFEIILARARELFGEKVPANPTLGMLGALAANNEVLLRPRDEKKRKTGYVRGTPLMFAQVRQGDQLAELRRICEVQGIEDQYEALRLGVFDHKHPYVPKERVGKDPLNPSTNRTIRASLEFQEFRILDSVANLRVRIGSRAKRELTEAEYDAAVEFLMDYADKEQPSWADVAEKIGVPGNRLVAPVLEDVQQKTAPYDRSSAAFEKAMGKKTEARQWWESTDDDQLRSLLIAFLVDATNDTEEAAAEAGLSELYKSWPAEEREALSNIDFEKGRVAYSQETLSKLSEYMHEYRVGLHEARKAVFGVDDTWRPPLDKLEEPTGQPAVDRVLTILRRFVLDCERQWGRPRAITVEHTRTGLMGPTQRQKILNEQKKNRADNERIRDELRESGVDNPSRAEVRRHLIVQEQECQCLYCGTMITTTTSELDHIVPRAGGGSSRRENLAAVCRACNAKKKRELFYAWAGPVKSQETIERVRQLKAFKDSKKAKMFKNQIRRLNQTEADEPIDERSLASTSYAAVAVRERLEQHFNEGLALDDKSRVVLDVYAGAVTRESRRAGGIDERILLRGERDKNRFDVRHHAVDAAVMTLLNRSVALTLEQRSQLRRAFYEQGLDKLDRDQLKPEEDWRNFIGLSLASQEKFLEWKKVTTVLGDLLAEAIEDDSIAVVSPLRLRPQNGRVHKDTIAAVKKQTLGSAWSADAVKRIVDPEIYLAMKDALGKSKVLPEDSARTLELSDGRYLEADDEVLFFPKNAASILTPRGVAEIGGSVHHVRLYAWRDRKGEIEVGMQRVFGAEFPWLMRESGVKDVFKVPVHRGSQSYRDLQDGVRKQIESGAAVEIGWITQGDEIQLNLDEVRDSMRSKELLTFLEIFPETRWRVDGLPDNRRLRMRPVLLASEGIEEFLKNAPEDIQTIVVNFFKNGALLSVSKVLALTETKIIRYNHLGFPRWRGVGRPVSLDIQRAAREALEGKKLEHHHHHH

SEQ ID NO: 821 - protein, 1133 aa, synthetic construct
MSTDMKNYRIGVDVGDRSVGLAAIEFDDDGLPIQKLALVTFRHDGGLDPTKNKTPMSRKETRGIARRTMRMNRERKRRLRNLDNVLENLGYSVPEGPEPETYEAWTSRALLASIKLASADELNEHLVRAVRHMARHRGWANPWWSLDQLEKASQEPSETFEIILARARELFGEKVPANPTLGMLGALAANNEVLLRPRDEKKRKTGYVRGTPLMFAQVRQGDQLAELRRICEVQGIEDQYEALRLGVFDHKHPYVPKERVGKDPLNPSTNRTIRASLEFQEFRILDSVANLRVRIGSRAKRELTEAEYDAAVEFLMDYADKEQPSWADVAEKIGVPGNRLVAPVLEDVQQKTAPYDRSSAAFEKAMGKKTEARQWWESTDDDQLRSLLIAFLVDATNDTEEAAAEAGLSELYKSWPAEEREALSNIDFEKGRVAYSQETLSKLSEYMHEYRVGLHEARKAVFGVDDTWRPPLDKLEEPTGQPAVDRVLTILRRFVLDCERQWGRPRAITVEHTRTGLMGPTQRQKILNEQKKNRADNERIRDELRESGVDNPSRAEVRRHLIVQEQECQCLYCGTMITTTTSELDHIVPRAGGGSSRRENLAAVCRACNAKKKRELFYAWAGPVKSQETIERVRQLKAFKDSKKAKMFKNQIRRLNQTEADEPIDERSLASTSYAAVAVRERLEQHFNEGLALDDKSRVVLDVYAGAVTRESRRAGGIDERILLRGERDKNRFDVRHHAVDAAVMTLLNRSVALTLEQRSQLRRAFYEQGLDKLDRDQLKPEEDWRNFIGLSLASQEKFLEWKKVTTVLGDLLAEAIEDDSIAVVSPLRLRPQNGRVHKDTIAAVKKQTLGSAWSADAVKRIVDPEIYLAMKDALGKSKVLPEDSARTLELSDGRYLEADDEVLFFPKNAASILTPRGVAEIGDSLHHARLYAWPTKKGHEIGMLRVFGAEFPWLFKTYGTKNALTVPIHPGSQSYRDMKDTLRKKIESGEAREIGWITQGDEIEIKIESYLQENDELGRFINLIPENRWKIDGFNDNGRLRLRPILLSYEEIPESYGEDVLGAKNHQLIRKVLERGAIITAGKILGAEGTKVLRRNHLGAPVWQGQQEARSLDISRAITEKLEGLEHHHHHH

SEQ ID NO: 822 - protein, 1127 aa, synthetic construct
MSTDMKNYRIGVDVGDRSVGLAAIEFDDDGLPIQKLALVTFRHDGGLDPTKNKTPMSRKETRGIARRTMRMNRERKRRLRNLDNVLENLGYSVPEGPEPETYEAWTSRALLASIKLASADELNEHLVRAVRHMARHRGWANPWWSLDQLEKASQEPSETFEIILARARELFGEKVPANPTLGMLGALAANNEVLLRPRDEKKRKTGYVRGTPLMFAQVRQGDQLAELRRICEVQGIEDQYEALRLGVFDHKHPYVPKERVGKDPLNPSTNRTIRASLEFQEFRILDSVANLRVRIGSRAKRELTEAEYDAAVEFLMDYADKEQPSWADVAEKIGVPGNRLVAPVLEDVQQKTAPYDRSSAAFEKAMGKKTEARQWWESTDDDQLRSLLIAFLVDATNDTEEAAAEAGLSELYKSWPAEEREALSNIDFEKGRVAYSQETLSKLSEYMHEYRVGLHEARKAVFGVDDTWRPPLDKLEEPTGQPAVDRVLTILRRFVLDCERQWGRPRAITVEHTRTGLMGPTQRQKILNEQKKNRADNERIRDELRESGVDNPSRAEVRRHLIVQEQECQCLYCGTMITTTTSELDHIVPRAGGGSSRRENLAAVCRACNAKKKRELFYAWAGPVKSQETIERVRQLKAFKDSKKAKMFKNQIRRLNQTEADEPIDERSLASTSYAAVAVRERLEQHFNEGLALDDKSRVVLDVYAGAVTRESRRAGGIDERILLRGERDKNRFDVRHHAVDAAVMTLLNRSVALTLEQRSQLRRAFYEQGLDKLDRDQLKPEEDWRNFIGLSLASQEKFLEWKKVTTVLGDLLAEAIEDDSIAVVSPLRLRPQNGRVHKDTIAAVKKQTLGSAWSADAVKRIVDPEIYLAMKDALGKSKVLPEDSARTLELSDGRYLEADDEVLFFPKNAASILTPRGVAEIGEQIHHARVYAWRGTKGEFQYGILRVFTAELPWLQRQAQSKDLFTMNIDDRSMSYRDLLQTVRKKIESDEARCIGWLTQNDELVLNVEVLRQGSDKIAHFLSTYPESRWKLDGFPENRRFRIRPLYLSREGSDHLDPICAEILEKGAIVGTSNLLSNVHQIIRRDSLGFERWRSQGGLPASWSVPDSTADTVETGLKLEHHHHHH

SEQ ID NO: 823 - protein, 1124 aa, synthetic construct
MSTDMKNYRIGVDVGDRSVGLAAIEFDDDGLPIQKLALVTFRHDGGLDPTKNKTPMSRKETRGIARRTMRMNRERKRRLRNLDNVLENLGYSVPEGPEPETYEAWTSRALLASIKLASADELNEHLVRAVRHMARHRGWANPWWSLDQLEKASQEPSETFEIILARARELFGEKVPANPTLGMLGALAANNEVLLRPRDEKKRKTGYVRGTPLMFAQVRQGDQLAELRRICEVQGIEDQYEALRLGVFDHKHPYVPKERVGKDPLNPSTNRTIRASLEFQEFRILDSVANLRVRIGSRAKRELTEAEYDAAVEFLMDYADKEQPSWADVAEKIGVPGNRLVAPVLEDVQQKTAPYDRSSAAFEKAMGKKTEARQWWESTDDDQLRSLLIAFLVDATNDTEEAAAEAGLSELYKSWPAEEREALSNIDFEKGRVAYSQETLSKLSEYMHEYRVGLHEARKAVFGVDDTWRPPLDKLEEPTGQPAVDRVLTILRRFVLDCERQWGRPRAITVEHTRTGLMGPTQRQKILNEQKKNRADNERIRDELRESGVDNPSRAEVRRHLIVQEQECQCLYCGTMITTTTSELDHIVPRAGGGSSRRENLAAVCRACNAKKKRELFYAWAGPVKSQETIERVRQLKAFKDSKKAKMFKNQIRRLNQTEADEPIDERSLASTSYAAVAVRERLEQHFNEGLALDDKSRVVLDVYAGAVTRESRRAGGIDERILLRGERDKNRFDVRHHAVDAAVMTLLNRSVALTLEQRSQLRRAFYEQGLDKLDRDQLKPEEDWRNFIGLSLASQEKFLEWKKVTTVLGDLLAEAIEDDSIAVVSPLRLRPQNGRVHKDTIAAVKKQTLGSAWSADAVKRIVDPEIYLAMKDALGKSKVLPEDSARTLELSDGRYLEADDEVLFFPKNAASILTPRGVAEIGESIHHARLVAWRDRKGVIQFGMVRVFTAEIPFMQRLAGKKDVFSIPVHPSTLSYRGVQLRVRKALDAGIAVELGWITQGDEIEIGLDDVASMTPEFRQFIAEIPEQRWRVDGFKDGGRLRVRPALLSAEGDAAVSDLVSKTLDKGSFVNAAGFIGAPSSVVIRRSALGVPRWRSAQGHLPVSFSPYQRAENLLLEHHHHHH

SEQ ID NO: 824 - protein, 1125 aa, synthetic construct
MSTDMKNYRIGVDVGDRSVGLAAIEFDDDGLPIQKLALVTFRHDGGLDPTKNKTPMSRKETRGIARRTMRMNRERKRRLRNLDNVLENLGYSVPEGPEPETYEAWTSRALLASIKLASADELNEHLVRAVRHMARHRGWANPWWSLDQLEKASQEPSETFEIILARARELFGEKVPANPTLGMLGALAANNEVLLRPRDEKKRKTGYVRGTPLMFAQVRQGDQLAELRRICEVQGIEDQYEALRLGVFDHKHPYVPKERVGKDPLNPSTNRTIRASLEFQEFRILDSVANLRVRIGSRAKRELTEAEYDAAVEFLMDYADKEQPSWADVAEKIGVPGNRLVAPVLEDVQQKTAPYDRSSAAFEKAMGKKTEARQWWESTDDDQLRSLLIAFLVDATNDTEEAAAEAGLSELYKSWPAEEREALSNIDFEKGRVAYSQETLSKLSEYMHEYRVGLHEARKAVFGVDDTWRPPLDKLEEPTGQPAVDRVLTILRRFVLDCERQWGRPRAITVEHTRTGLMGPTQRQKILNEQKKNRADNERIRDELRESGVDNPSRAEVRRHLIVQEQECQCLYCGTMITTTTSELDHIVPRAGGGSSRRENLAAVCRACNAKKKRELFYAWAGPVKSQETIERVRQLKAFKDSKKAKMFKNQIRRLNQTEADEPIDERSLASTSYAAVAVRERLEQHFNEGLALDDKSRVVLDVYAGAVTRESRRAGGIDERILLRGERDKNRFDVRHHAVDAAVMTLLNRSVALTLEQRSQLRRAFYEQGLDKLDRDQLKPEEDWRNFIGLSLASQEKFLEWKKVTTVLGDLLAEAIEDDSIAVVSPLRLRPQNGRVHKDTIAAVKKQTLGSAWSADAVKRIVDPEIYLAMKDALGKSKVLPEDSARTLELSDGRYLEADDEVLFFPKNAASILTPRGVAEISDSLHHFRVYAWKDKKGAIQFGQQRVFGAEFRAMWGDPRQVDVFTAPVPRWAFAHREMPPKVKAAIEAGNAKQIGWYTRNDEIELDLSELMAQSNVLGEFLRELPEKSWRIRGSHSLSRLSLSPLYLSSEGTDLSEQSRPVQDAVSKGIPVSASSILDSESMIIRRGPLGIPKWNGGNATSYSFRQVAEEVLGTDLEHHHHHH

SEQ ID NO: 825 - protein, 1122 aa, synthetic construct
MSTDMKNYRIGVDVGDRSVGLAAIEFDDDGLPIQKLALVTFRHDGGLDPTKNKTPMSRKETRGIARRTMRMNRERKRRLRNLDNVLENLGYSVPEGPEPETYEAWTSRALLASIKLASADELNEHLVRAVRHMARHRGWANPWWSLDQLEKASQEPSETFEIILARARELFGEKVPANPTLGMLGALAANNEVLLRPRDEKKRKTGYVRGTPLMFAQVRQGDQLAELRRICEVQGIEDQYEALRLGVFDHKHPYVPKERVGKDPLNPSTNRTIRASLEFQEFRILDSVANLRVRIGSRAKRELTEAEYDAAVEFLMDYADKEQPSWADVAEKIGVPGNRLVAPVLEDVQQKTAPYDRSSAAFEKAMGKKTEARQWWESTDDDQLRSLLIAFLVDATNDTEEAAAEAGLSELYKSWPAEEREALSNIDFEKGRVAYSQETLSKLSEYMHEYRVGLHEARKAVFGVDDTWRPPLDKLEEPTGQPAVDRVLTILRRFVLDCERQWGRPRAITVEHTRTGLMGPTQRQKILNEQKKNRADNERIRDELRESGVDNPSRAEVRRHLIVQEQECQCLYCGTMITTTTSELDHIVPRAGGGSSRRENLAAVCRACNAKKKRELFYAWAGPVKSQETIERVRQLKAFKDSKKAKMFKNQIRRLNQTEADEPIDERSLASTSYAAVAVRERLEQHFNEGLALDDKSRVVLDVYAGAVTRESRRAGGIDERILLRGERDKNRFDVRHHAVDAAVMTLLNRSVALTLEQRSQLRRAFYEQGLDKLDRDQLKPEEDWRNFIGLSLASQEKFLEWKKVTTVLGDLLAEAIEDDSIAVVSPLRLRPQNGRVHKDTIAAVKKQTLGSAWSADAVKRIVDPEIYLAMKDALGKSKVLPEDSARTLELSDGRYLEADDEVLFFPKNAASILTPRGVAEIGSIHHARLYAWHGTRGIEFGMVRVFAGELAAMWPSPATDVLTAPVPTWSMSYRRAAPPVMKRLRADTAVPIGWIAPGDEIVVLPRQEGARASSLDDLVASVGEDRWTITGFEQPGIINIVPRLLSAEGISEETPEAVASVLTRSGRPSTNSLVPRIRVIRRDALGRERQRGGGRLPSSFVPFEVAEQRLQGDLEHHHHHH

SEQ ID NO: 826 - protein, 1122 aa, synthetic construct
MSTDMKNYRIGVDVGDRSVGLAAIEFDDDGLPIQKLALVTFRHDGGLDPTKNKTPMSRKETRGIARRTMRMNRERKRRLRNLDNVLENLGYSVPEGPEPETYEAWTSRALLASIKLASADELNEHLVRAVRHMARHRGWANPWWSLDQLEKASQEPSETFEIILARARELFGEKVPANPTLGMLGALAANNEVLLRPRDEKKRKTGYVRGTPLMFAQVRQGDQLAELRRICEVQGIEDQYEALRLGVFDHKHPYVPKERVGKDPLNPSTNRTIRASLEFQEFRILDSVANLRVRIGSRAKRELTEAEYDAAVEFLMDYADKEQPSWADVAEKIGVPGNRLVAPVLEDVQQKTAPYDRSSAAFEKAMGKKTEARQWWESTDDDQLRSLLIAFLVDATNDTEEAAAEAGLSELYKSWPAEEREALSNIDFEKGRVAYSQETLSKLSEYMHEYRVGLHEARKAVFGVDDTWRPPLDKLEEPTGQPAVDRVLTILRRFVLDCERQWGRPRAITVEHTRTGLMGPTQRQKILNEQKKNRADNERIRDELRESGVDNPSRAEVRRHLIVQEQECQCLYCGTMITTTTSELDHIVPRAGGGSSRRENLAAVCRACNAKKKRELFYAWAGPVKSQETIERVRQLKAFKDSKKAKMFKNQIRRLNQTEADEPIDERSLASTSYAAVAVRERLEQHFNEGLALDDKSRVVLDVYAGAVTRESRRAGGIDERILLRGERDKNRFDVRHHAVDAAVMTLLNRSVALTLEQRSQLRRAFYEQGLDKLDRDQLKPEEDWRNFIGLSLASQEKFLEWKKVTTVLGDLLAEAIEDDSIAVVSPLRLRPQNGRVHKDTIAAVKKQTLGSAWSADAVKRIVDPEIYLAMKDALGKSKVLPEDSARTLELSDGRYLEADDEVLFFPKNAASILTPRGVAEIGAIHHARLYAWRGTRGIEFGMMRVFAGELTAMWPSPATDVLTAPVPEWSMSYRRTAPAVMQQLRSDTAVQVGWIAPGDEIVVLPPREGARASSLDSLVSSVGEDRWTVTGFERATTINVAPRLLSAEGISEETPKAVTSVLNRPGRLAASSLLPRIRVIRRDALGRERRRGGGRLPSSFVPFEVAEQRLQGDLEHHHHHH

SEQ ID NO: 827 - protein, 1143 aa, synthetic construct
MSTDMKNYRIGVDVGDRSVGLAAIEFDDDGLPIQKLALVTFRHDGGLDPTKNKTPMSRKETRGIARRTMRMNRERKRRLRNLDNVLENLGYSVPEGPEPETYEAWTSRALLASIKLASADELNEHLVRAVRHMARHRGWANPWWSLDQLEKASQEPSETFEIILARARELFGEKVPANPTLGMLGALAANNEVLLRPRDEKKRKTGYVRGTPLMFAQVRQGDQLAELRRICEVQGIEDQYEALRLGVFDHKHPYVPKERVGKDPLNPSTNRTIRASLEFQEFRILDSVANLRVRIGSRAKRELTEAEYDAAVEFLMDYADKEQPSWADVAEKIGVPGNRLVAPVLEDVQQKTAPYDRSSAAFEKAMGKKTEARQWWESTDDDQLRSLLIAFLVDATNDTEEAAAEAGLSELYKSWPAEEREALSNIDFEKGRVAYSQETLSKLSEYMHEYRVGLHEARKAVFGVDDTWRPPLDKLEEPTGQPAVDRVLTILRRFVLDCERQWGRPRAITVEHTRTGLMGPTQRQKILNEQKKNRADNERIRDELRESGVDNPSRAEVRRHLIVQEQECQCLYCGTMITTTTSELDHIVPRAGGGSSRRENLAAVCRACNAKKKRELFYAWAGPVKSQETIERVRQLKAFKDSKKAKMFKNQIRRLNQTEADEPIDERSLASTSYAAVAVRERLEQHFNEGLALDDKSRVVLDVYAGAVTRESRRAGGIDERILLRGERDKNRFDVRHHAVDAAVMTLLNRSVALTLEQRSQLRRAFYEQGLDKLDRDQLKPEEDWRNFIGLSLASQEKFLEWKKVTTVLGDLLAEAIEDDSIAVVSPLRLRPQNGRVHKDTIAAVKKQTLGSAWSADAVKRIVDPEIYLAMKDALGKSKVLPEDSARTLELSDGRYLEADDEVLFFPKNAASILTPRGVAEIGGSIHHARLYSWLTKKGDLKVNVLRVYGAEFPWLMRESGSSDVLRMPIHPGSQSFRDVQEETIEMIEGGFAKEIAWITQNDELEFDPVEYINLPGRSDKLTRFLIYMPETRWRVDGFPESRNLRIRPLMLSQEDLPSEIKKHKEEKQLSDEEKLLVEALEKGLIITSSKLLGLKSIKVIRRNNLGFPRWRGNGNLPTSFEVRSSALRALGVEGLEHHHHHH

SEQ ID NO: 828 - protein, 1128 aa, synthetic construct
MSTDMKNYRIGVDVGDRSVGLAAIEFDDDGLPIQKLALVTFRHDGGLDPTKNKTPMSRKETRGIARRTMRMNRERKRRLRNLDNVLENLGYSVPEGPEPETYEAWTSRALLASIKLASADELNEHLVRAVRHMARHRGWANPWWSLDQLEKASQEPSETFEIILARARELFGEKVPANPTLGMLGALAANNEVLLRPRDEKKRKTGYVRGTPLMFAQVRQGDQLAELRRICEVQGIEDQYEALRLGVFDHKHPYVPKERVGKDPLNPSTNRTIRASLEFQEFRILDSVANLRVRIGSRAKRELTEAEYDAAVEFLMDYADKEQPSWADVAEKIGVPGNRLVAPVLEDVQQKTAPYDRSSAAFEKAMGKKTEARQWWESTDDDQLRSLLIAFLVDATNDTEEAAAEAGLSELYKSWPAEEREALSNIDFEKGRVAYSQETLSKLSEYMHEYRVGLHEARKAVFGVDDTWRPPLDKLEEPTGQPAVDRVLTILRRFVLDCERQWGRPRAITVEHTRTGLMGPTQRQKILNEQKKNRADNERIRDELRESGVDNPSRAEVRRHLIVQEQECQCLYCGTMITTTTSELDHIVPRAGGGSSRRENLAAVCRACNAKKKRELFYAWAGPVKSQETIERVRQLKAFKDSKKAKMFKNQIRRLNQTEADEPIDERSLASTSYAAVAVRERLEQHFNEGLALDDKSRVVLDVYAGAVTRESRRAGGIDERILLRGERDKNRFDVRHHAVDAAVMTLLNRSVALTLEQRSQLRRAFYEQGLDKLDRDQLKPEEDWRNFIGLSLASQEKFLEWKKVTTVLGDLLAEAIEDDSIAVVSPLRLRPQNGRVHKDTIAAVKKQTLGSAWSADAVKRIVDPEIYLAMKDALGKSKVLPEDSARTLELSDGRYLEADDEVLFFPKNAASILTPRGVAEIGKARHHARILTWDDPKKGPQLGIQRVFAAELGEMLKDASSNDLFEAPIPFHTMSHRDLQPQVRAAVEQGLTRQIGWITLGDEIEIDPSDFAEDTTKFGKFLREFPERNWSIAGLKESRKLVLRPLMLSAEGASPANSSLTAEVLDGGVKVHPSTLLASPGTTIIRRTGLGRPRWDSGLAHLPESFNVHARMTQQSARDLEHHHHHH

SEQ ID NO: 829 - protein, 1139 aa, synthetic construct
MSTDMKNYRIGVDVGDRSVGLAAIEFDDDGLPIQKLALVTFRHDGGLDPTKNKTPMSRKETRGIARRTMRMNRERKRRLRNLDNVLENLGYSVPEGPEPETYEAWTSRALLASIKLASADELNEHLVRAVRHMARHRGWANPWWSLDQLEKASQEPSETFEIILARARELFGEKVPANPTLGMLGALAANNEVLLRPRDEKKRKTGYVRGTPLMFAQVRQGDQLAELRRICEVQGIEDQYEALRLGVFDHKHPYVPKERVGKDPLNPSTNRTIRASLEFQEFRILDSVANLRVRIGSRAKRELTEAEYDAAVEFLMDYADKEQPSWADVAEKIGVPGNRLVAPVLEDVQQKTAPYDRSSAAFEKAMGKKTEARQWWESTDDDQLRSLLIAFLVDATNDTEEAAAEAGLSELYKSWPAEEREALSNIDFEKGRVAYSQETLSKLSEYMHEYRVGLHEARKAVFGVDDTWRPPLDKLEEPTGQPAVDRVLTILRRFVLDCERQWGRPRAITVEHTRTGLMGPTQRQKILNEQKKNRADNERIRDELRESGVDNPSRAEVRRHLIVQEQECQCLYCGTMITTTTSELDHIVPRAGGGSSRRENLAAVCRACNAKKKRELFYAWAGPVKSQETIERVRQLKAFKDSKKAKMFKNQIRRLNQTEADEPIDERSLASTSYAAVAVRERLEQHFNEGLALDDKSRVVLDVYAGAVTRESRRAGGIDERILLRGERDKNRFDVRHHAVDAAVMTLLNRSVALTLEQRSQLRRAFYEQGLDKLDRDQLKPEEDWRNFIGLSLASQEKFLEWKKVTTVLGDLLAEAIEDDSIAVVSPLRLRPQNGRVHKDTIAAVKKQTLGSAWSADAVKRIVDPEIYLAMKDALGKSKVLPEDSARTLELSDGRYLEADDEVLFFPKNAASILTPRGVAEIGDSIHHARLYGWKNQRGDIQVGMLRVFGAEFPWFMRESGVKDILRVPIPQGSQSYRDLAATTRKFIENGQATEFGWITQNDEIEISAEEYLATDKGDILSDFLTVLPENRWKVVGIGDNRRFKIRPLLLSNEIIPDTLNGRSIKSEERDLIVSVLDKGVRVVASTLLTLPSTKIIRRNNLGIPRWRGNSHLPTSLDIQRAATQALEGRDLEHHHHHH

SEQ ID NO: 830 - protein, 1139 aa, synthetic construct
MSTDMKNYRIGVDVGDRSVGLAAIEFDDDGLPIQKLALVTFRHDGGLDPTKNKTPMSRKETRGIARRTMRMNRERKRRLRNLDNVLENLGYSVPEGPEPETYEAWTSRALLASIKLASADELNEHLVRAVRHMARHRGWANPWWSLDQLEKASQEPSETFEIILARARELFGEKVPANPTLGMLGALAANNEVLLRPRDEKKRKTGYVRGTPLMFAQVRQGDQLAELRRICEVQGIEDQYEALRLGVFDHKHPYVPKERVGKDPLNPSTNRTIRASLEFQEFRILDSVANLRVRIGSRAKRELTEAEYDAAVEFLMDYADKEQPSWADVAEKIGVPGNRLVAPVLEDVQQKTAPYDRSSAAFEKAMGKKTEARQWWESTDDDQLRSLLIAFLVDATNDTEEAAAEAGLSELYKSWPAEEREALSNIDFEKGRVAYSQETLSKLSEYMHEYRVGLHEARKAVFGVDDTWRPPLDKLEEPTGQPAVDRVLTILRRFVLDCERQWGRPRAITVEHTRTGLMGPTQRQKILNEQKKNRADNERIRDELRESGVDNPSRAEVRRHLIVQEQECQCLYCGTMITTTTSELDHIVPRAGGGSSRRENLAAVCRACNAKKKRELFYAWAGPVKSQETIERVRQLKAFKDSKKAKMFKNQIRRLNQTEADEPIDERSLASTSYAAVAVRERLEQHFNEGLALDDKSRVVLDVYAGAVTRESRRAGGIDERILLRGERDKNRFDVRHHAVDAAVMTLLNRSVALTLEQRSQLRRAFYEQGLDKLDRDQLKPEEDWRNFIGLSLASQEKFLEWKKVTTVLGDLLAEAIEDDSIAVVSPLRLRPQNGRVHKDTIAAVKKQTLGSAWSADAVKRIVDPEIYLAMKDALGKSKVLPEDSARTLELSDGRYLEADDEVLFFPKNAASILTPRGVAEIGDSIHHARLYGWKNQRGDIQVGMLRVFGAEFPWFMRESGVKDILRVPIPQGSQSYRDLAPTVRKNIENDKAVEFGWFTQNDELEIDPFDYIQHGGKDKLARFLSYMPESRWRIDGISMNNKLRIRPNLLSGEELPAKVYGKELSEEQYKLLEETLKTGLIIATEGLLSLKSARIVRRNNLGIPRWRGNGHLPTSLDIQRAAAQALEGRDLEHHHHHH

SEQ ID NO: 831 - protein, 1034 aa, synthetic construct
MSTDMKNYRIGVDVGDRSVGLAAIEFDDDGLPIQKLALVTFRHDGGLDPTKNKTPMSRKETRGIARRTMRMNRERKRRLRNLDNVLENLGYSVPEGPEPETYEAWTSRALLASIKLASADELNEHLVRAVRHMARHRGWANPWWSLDQLEKASQEPSETFEIILARARELFGEKVPANPTLGMLGALAANNEVLLRPRDEKKRKTGYVRGTPLMFAQVRQGDQLAELRRICEVQGIEDQYEALRLGVFDHKHPYVPKERVGKDPLNPSTNRTIRASLEFQEFRILDSVANLRVRIGSRAKRELTEAEYDAAVEFLMDYADKEQPSWADVAEKIGVPGNRLVAPVLEDVQQKTAPYDRSSAAFEKAMGKKTEARQWWESTDDDQLRSLLIAFLVDATNDTEEAAAEAGLSELYKSWPAEEREALSNIDFEKGRVAYSQETLSKLSEYMHEYRVGLHEARKAVFGVDDTWRPPLDKLEEPTGQPAVDRVLTILRRFVLDCERQWGRPRAITVEHTRTGLMGPTQRQKILNEQKKNRADNERIRDELRESGVDNPSRAEVRRHLIVQEQECQCLYCGTMITTTTSELDHIVPRAGGGSSRRENLAAVCRACNAKKKRELFYAWAGPVKSQETIERVRQLKAFKDSKKAKMFKNQIRRLNQTEADEPIDERSLASTSYAAVAVRERLEQHFNEGLALDDKSRVVLDVYAGAVTRESRRAGGIDERILLRGERDKNRFDVRHHAVDAAVMTLLNRSVALTLEQRSQLRRAFYEQGLDKLDRDQLKPEEDWRNFIGLSLASQEKFLEWKKVTTVLGDLLAEAIEDDSIAVVSPLRLRPQNGRVHKDTIAAVKKQTLGSAWSADAVKRIVDPEIYLAMKDALGKSKVLPEDSARTLELSDGRYLEADDEVLFFPKNAASILTPRGVAEINNNVFKTNVHNVGVDVYLDEKGKKKAYERKNPRLSKHFIEPPPQPNGRVSFTLKRRDMVTVEGEDAIYRIKKLGTSPTIEAVVGSDGKTRTVSATKLTKANSAELEHHHHHH

SEQ ID NO: 832 - protein, 1124 aa, synthetic construct
MSTDMKNYRIGVDVGDRSVGLAAIEFDDDGLPIQKLALVTFRHDGGLDPTKNKTPMSRKETRGIARRTMRMNRERKRRLRNLDNVLENLGYSVPEGPEPETYEAWTSRALLASIKLASADELNEHLVRAVRHMARHRGWANPWWSLDQLEKASQEPSETFEIILARARELFGEKVPANPTLGMLGALAANNEVLLRPRDEKKRKTGYVRGTPLMFAQVRQGDQLAELRRICEVQGIEDQYEALRLGVFDHKHPYVPKERVGKDPLNPSTNRTIRASLEFQEFRILDSVANLRVRIGSRAKRELTEAEYDAAVEFLMDYADKEQPSWADVAEKIGVPGNRLVAPVLEDVQQKTAPYDRSSAAFEKAMGKKTEARQWWESTDDDQLRSLLIAFLVDATNDTEEAAAEAGLSELYKSWPAEEREALSNIDFEKGRVAYSQETLSKLSEYMHEYRVGLHEARKAVFGVDDTWRPPLDKLEEPTGQPAVDRVLTILRRFVLDCERQWGRPRAITVEHTRTGLMGPTQRQKILNEQKKNRADNERIRDELRESGVDNPSRAEVRRHLIVQEQECQCLYCGTMITTTTSELDHIVPRAGGGSSRRENLAAVCRACNAKKKRELFYAWAGPVKSQETIERVRQLKAFKDSKKAKMFKNQIRRLNQTEADEPIDERSLASTSYAAVAVRERLEQHFNEGLALDDKSRVVLDVYAGAVTRESRRAGGIDERILLRGERDKNRFDVRHHAVDAAVMTLLNRSVALTLEQRSQLRRAFYEQGLDKLDRDQLKPEEDWRNFIGLSLASQEKFLEWKKVTTVLGDLLAEAIEDDSIAVVSPLRLRPQNGRVHKDTIAAVKKQTLGSAWSADAVKRIVDPEIYLAMKDALGKSKVLPEDSARTLELSDGRYLEADDEVLFFPKNAASILTPRGVAEIGAIHHARVYAWKTPKGKIAYGMVRVFGGEFGRIGFRKKRVNVFTKELPIWSESWRLAEPRVTAFISNGAAKQIGWLTIGDELDFGDPDKVPGNGAIQEFLKEFPETRWQIDGFESPSTLRLRPLYLAKEGLPEVSNKAIKTIVDLPGWRPSINVALSANSLSTIRRTALGRPRWESTSLPISWSPFQKANQALLLEHHHHHH

SEQ ID NO: 833 - protein, 1173 aa, synthetic construct
MSTDMKNYRIGVDVGDRSVGLAAIEFDDDGLPIQKLALVTFRHDGGLDPTKNKTPMSRKETRGIARRTMRMNRERKRRLRNLDNVLENLGYSVPEGPEPETYEAWTSRALLASIKLASADELNEHLVRAVRHMARHRGWANPWWSLDQLEKASQEPSETFEIILARARELFGEKVPANPTLGMLGALAANNEVLLRPRDEKKRKTGYVRGTPLMFAQVRQGDQLAELRRICEVQGIEDQYEALRLGVFDHKHPYVPKERVGKDPLNPSTNRTIRASLEFQEFRILDSVANLRVRIGSRAKRELTEAEYDAAVEFLMDYADKEQPSWADVAEKIGVPGNRLVAPVLEDVQQKTAPYDRSSAAFEKAMGKKTEARQWWESTDDDQLRSLLIAFLVDATNDTEEAAAEAGLSELYKSWPAEEREALSNIDFEKGRVAYSQETLSKLSEYMHEYRVGLHEARKAVFGVDDTWRPPLDKLEEPTGQPAVDRVLTILRRFVLDCERQWGRPRAITVEHTRTGLMGPTQRQKILNEQKKNRADNERIRDELRESGVDNPSRAEVRRHLIVQEQECQCLYCGTMITTTTSELDHIVPRAGGGSSRRENLAAVCRACNAKKKRELFYAWAGPVKSQETIERVRQLKAFKDSKKAKMFKNQIRRLNQTEADEPIDERSLASTSYAAVAVRERLEQHFNEGLALDDKSRVVLDVYAGAVTRESRRAGGIDERILLRGERDKNRFDVRHHAVDAAVMTLLNRSVALTLEQRSQLRRAFYEQGLDKLDRDQLKPEEDWRNFIGLSLASQEKFLEWKKVTTVLGDLLAEAIEDDSIAVVSPLRLRPQNGRVHKDTIAAVKKQTLGSAWSADAVKRIVDPEIYLAMKDALGKSKVLPEDSARTLELSDGRYLEADDEVLFFPKNAASILTPRGVAEISYVHHARVYAWETTSNSKKEEPEYSFGIVRVFAGEFPRMGFLKDGADVFTKALPEWSESYRLSDETVLSKLKSGEAKQIGWLLAGDELEFGSGFLSQIKGNNSIKAFTSTYPADNRWVVSGMPLTSSLTLSPSYLSQETLVKKSKKSSSKTTVSTTETLTRDTSDESAGDDVDDSTKTDPALKVVESGWDVKMKKIFADPDLKIIRRSILGVPRWHDTWNQEREKERLPKSWQPHLEAKRLLGLEHHHHHH

SEQ ID NO: 834 - protein, 1125 aa, synthetic construct
MSTDMKNYRIGVDVGDRSVGLAAIEFDDDGLPIQKLALVTFRHDGGLDPTKNKTPMSRKETRGIARRTMRMNRERKRRLRNLDNVLENLGYSVPEGPEPETYEAWTSRALLASIKLASADELNEHLVRAVRHMARHRGWANPWWSLDQLEKASQEPSETFEIILARARELFGEKVPANPTLGMLGALAANNEVLLRPRDEKKRKTGYVRGTPLMFAQVRQGDQLAELRRICEVQGIEDQYEALRLGVFDHKHPYVPKERVGKDPLNPSTNRTIRASLEFQEFRILDSVANLRVRIGSRAKRELTEAEYDAAVEFLMDYADKEQPSWADVAEKIGVPGNRLVAPVLEDVQQKTAPYDRSSAAFEKAMGKKTEARQWWESTDDDQLRSLLIAFLVDATNDTEEAAAEAGLSELYKSWPAEEREALSNIDFEKGRVAYSQETLSKLSEYMHEYRVGLHEARKAVFGVDDTWRPPLDKLEEPTGQPAVDRVLTILRRFVLDCERQWGRPRAITVEHTRTGLMGPTQRQKILNEQKKNRADNERIRDELRESGVDNPSRAEVRRHLIVQEQECQCLYCGTMITTTTSELDHIVPRAGGGSSRRENLAAVCRACNAKKKRELFYAWAGPVKSQETIERVRQLKAFKDSKKAKMFKNQIRRLNQTEADEPIDERSLASTSYAAVAVRERLEQHFNEGLALDDKSRVVLDVYAGAVTRESRRAGGIDERILLRGERDKNRFDVRHHAVDAAVMTLLNRSVALTLEQRSQLRRAFYEQGLDKLDRDQLKPEEDWRNFIGLSLASQEKFLEWKKVTTVLGDLLAEAIEDDSIAVVSPLRLRPQNGRVHKDTIAAVKKQTLGSAWSADAVKRIVDPEIYLAMKDALGKSKVLPEDSARTLELSDGRYLEADDEVLFFPKNAASILTPRGVAEIGGTVKYARVYAWRTKTGFDYGMVRMYVGEFPKIGFSGPGVDIFTAPLPPYSQAIRTANPRLRKRIESGEARQIGWVATDDELELAPSEFAIGDTKMALFMQQLPESRWLITGFFNTTKFSIAPSYLASEGIDESTAESVASVVKANRIPLGVNVVLASANCTIIRRTVTGAPRWHGDGLPRSWNVREAAEQAFSSLEHHHHHH

SEQ ID NO: 835 - protein, 1138 aa, synthetic construct
MSTDMKNYRIGVDVGDRSVGLAAIEFDDDGLPIQKLALVTFRHDGGLDPTKNKTPMSRKETRGIARRTMRMNRERKRRLRNLDNVLENLGYSVPEGPEPETYEAWTSRALLASIKLASADELNEHLVRAVRHMARHRGWANPWWSLDQLEKASQEPSETFEIILARARELFGEKVPANPTLGMLGALAANNEVLLRPRDEKKRKTGYVRGTPLMFAQVRQGDQLAELRRICEVQGIEDQYEALRLGVFDHKHPYVPKERVGKDPLNPSTNRTIRASLEFQEFRILDSVANLRVRIGSRAKRELTEAEYDAAVEFLMDYADKEQPSWADVAEKIGVPGNRLVAPVLEDVQQKTAPYDRSSAAFEKAMGKKTEARQWWESTDDDQLRSLLIAFLVDATNDTEEAAAEAGLSELYKSWPAEEREALSNIDFEKGRVAYSQETLSKLSEYMHEYRVGLHEARKAVFGVDDTWRPPLDKLEEPTGQPAVDRVLTILRRFVLDCERQWGRPRAITVEHTRTGLMGPTQRQKILNEQKKNRADNERIRDELRESGVDNPSRAEVRRHLIVQEQECQCLYCGTMITTTTSELDHIVPRAGGGSSRRENLAAVCRACNAKKKRELFYAWAGPVKSQETIERVRQLKAFKDSKKAKMFKNQIRRLNQTEADEPIDERSLASTSYAAVAVRERLEQHFNEGLALDDKSRVVLDVYAGAVTRESRRAGGIDERILLRGERDKNRFDVRHHAVDAAVMTLLNRSVALTLEQRSQLRRAFYEQGLDKLDRDQLKPEEDWRNFIGLSLASQEKFLEWKKVTTVLGDLLAEAIEDDSIAVVSPLRLRPQNGRVHKDTIAAVKKQTLGSAWSADAVKRIVDPEIYLAMKDALGKSKVLPEDSARTLELSDGRYLEADDEVLFFPKNAASILTPRGVAEIGGTIRFAQIYAWKTKDGFNFGMVRLYVGEFPRIGFGGPGNDFLTTTPPAHSQAMRTANSALRQRIQSGDARLIGWIAVDDEIEIEPTYFQTDGTKLGEFLTLFPEKHWLITGIAEPGKIGIAPSYLAYEGVVTAADMERGGARSEHETPAAVSEVLKANRIPMSVNVILGSPGCNVLRRTVLGRPRWTGDSLPTSWNVLAAAEEAFEKLEHHHHHH

SEQ ID NO: 836 - protein, 1132 aa, synthetic construct
MSTDMKNYRIGVDVGDRSVGLAAIEFDDDGLPIQKLALVTFRHDGGLDPTKNKTPMSRKETRGIARRTMRMNRERKRRLRNLDNVLENLGYSVPEGPEPETYEAWTSRALLASIKLASADELNEHLVRAVRHMARHRGWANPWWSLDQLEKASQEPSETFEIILARARELFGEKVPANPTLGMLGALAANNEVLLRPRDEKKRKTGYVRGTPLMFAQVRQGDQLAELRRICEVQGIEDQYEALRLGVFDHKHPYVPKERVGKDPLNPSTNRTIRASLEFQEFRILDSVANLRVRIGSRAKRELTEAEYDAAVEFLMDYADKEQPSWADVAEKIGVPGNRLVAPVLEDVQQKTAPYDRSSAAFEKAMGKKTEARQWWESTDDDQLRSLLIAFLVDATNDTEEAAAEAGLSELYKSWPAEEREALSNIDFEKGRVAYSQETLSKLSEYMHEYRVGLHEARKAVFGVDDTWRPPLDKLEEPTGQPAVDRVLTILRRFVLDCERQWGRPRAITVEHTRTGLMGPTQRQKILNEQKKNRADNERIRDELRESGVDNPSRAEVRRHLIVQEQECQCLYCGTMITTTTSELDHIVPRAGGGSSRRENLAAVCRACNAKKKRELFYAWAGPVKSQETIERVRQLKAFKDSKKAKMFKNQIRRLNQTEADEPIDERSLASTSYAAVAVRERLEQHFNEGLALDDKSRVVLDVYAGAVTRESRRAGGIDERILLRGERDKNRFDVRHHAVDAAVMTLLNRSVALTLEQRSQLRRAFYEQGLDKLDRDQLKPEEDWRNFIGLSLASQEKFLEWKKVTTVLGDLLAEAIEDDSIAVVSPLRLRPQNGRVHKDTIAAVKKQTLGSAWSADAVKRIVDPEIYLAMKDALGKSKVLPEDSARTLELSDGRYLEADDEVLFFPKNAASILTPRGVAEIGGSVHHARLFRWPGKGGAWNAGIVRVFASDLYDLEGGVEGPILSAPLLARSRAVRRSQLPVREAIERGIAEQVGSFVIGDEIEIVPSEWGTSGKAGEFFARFPERRWRLTGWEQEGVLNLRPMYLALEGATLASDDEEPDSRLVRISRTEEDIIKRTLRVAPSWLWKTPSTRVVRRTALGEPREATTGVPMSWSPHRAVFGDLEHHHHHH

SEQ ID NO: 837 - protein, 1135 aa, synthetic construct
MSTDMKNYRIGVDVGDRSVGLAAIEFDDDGLPIQKLALVTFRHDGGLDPTKNKTPMSRKETRGIARRTMRMNRERKRRLRNLDNVLENLGYSVPEGPEPETYEAWTSRALLASIKLASADELNEHLVRAVRHMARHRGWANPWWSLDQLEKASQEPSETFEIILARARELFGEKVPANPTLGMLGALAANNEVLLRPRDEKKRKTGYVRGTPLMFAQVRQGDQLAELRRICEVQGIEDQYEALRLGVFDHKHPYVPKERVGKDPLNPSTNRTIRASLEFQEFRILDSVANLRVRIGSRAKRELTEAEYDAAVEFLMDYADKEQPSWADVAEKIGVPGNRLVAPVLEDVQQKTAPYDRSSAAFEKAMGKKTEARQWWESTDDDQLRSLLIAFLVDATNDTEEAAAEAGLSELYKSWPAEEREALSNIDFEKGRVAYSQETLSKLSEYMHEYRVGLHEARKAVFGVDDTWRPPLDKLEEPTGQPAVDRVLTILRRFVLDCERQWGRPRAITVEHTRTGLMGPTQRQKILNEQKKNRADNERIRDELRESGVDNPSRAEVRRHLIVQEQECQCLYCGTMITTTTSELDHIVPRAGGGSSRRENLAAVCRACNAKKKRELFYAWAGPVKSQETIERVRQLKAFKDSKKAKMFKNQIRRLNQTEADEPIDERSLASTSYAAVAVRERLEQHFNEGLALDDKSRVVLDVYAGAVTRESRRAGGIDERILLRGERDKNRFDVRHHAVDAAVMTLLNRSVALTLEQRSQLRRAFYEQGLDKLDRDQLKPEEDWRNFIGLSLASQEKFLEWKKVTTVLGDLLAEAIEDDSIAVVSPLRLRPQNGRVHKDTIAAVKKQTLGSAWSADAVKRIVDPEIYLAMKDALGKSKVLPEDSARTLELSDGRYLEADDEVLFFPKNAASILTPRGVAEIGQSIHHARLYRWRDARGRVAGGVIRVWAADLYDLDGGVRADLLTAALRPSSRAVRRAKNVKLRDALVQGIAEHVGTFVVGDEILIDPAEWAGDNEPGRFLAEWPERHWRLAGLMSDSQFTMTPMYLSQEGVVREEEFDPDEHRRIVPVSADAFKVISDRLRISASSLWSTESTRVIRRTGSGAVREAPDRGLPASWSPYLAVHGSLEHHHHHH

SEQ ID NO: 838 - protein, 1140 aa, synthetic construct
MSTDMKNYRIGVDVGDRSVGLAAIEFDDDGLPIQKLALVTFRHDGGLDPTKNKTPMSRKETRGIARRTMRMNRERKRRLRNLDNVLENLGYSVPEGPEPETYEAWTSRALLASIKLASADELNEHLVRAVRHMARHRGWANPWWSLDQLEKASQEPSETFEIILARARELFGEKVPANPTLGMLGALAANNEVLLRPRDEKKRKTGYVRGTPLMFAQVRQGDQLAELRRICEVQGIEDQYEALRLGVFDHKHPYVPKERVGKDPLNPSTNRTIRASLEFQEFRILDSVANLRVRIGSRAKRELTEAEYDAAVEFLMDYADKEQPSWADVAEKIGVPGNRLVAPVLEDVQQKTAPYDRSSAAFEKAMGKKTEARQWWESTDDDQLRSLLIAFLVDATNDTEEAAAEAGLSELYKSWPAEEREALSNIDFEKGRVAYSQETLSKLSEYMHEYRVGLHEARKAVFGVDDTWRPPLDKLEEPTGQPAVDRVLTILRRFVLDCERQWGRPRAITVEHTRTGLMGPTQRQKILNEQKKNRADNERIRDELRESGVDNPSRAEVRRHLIVQEQECQCLYCGTMITTTTSELDHIVPRAGGGSSRRENLAAVCRACNAKKKRELFYAWAGPVKSQETIERVRQLKAFKDSKKAKMFKNQIRRLNQTEADEPIDERSLASTSYAAVAVRERLEQHFNEGLALDDKSRVVLDVYAGAVTRESRRAGGIDERILLRGERDKNRFDVRHHAVDAAVMTLLNRSVALTLEQRSQLRRAFYEQGLDKLDRDQLKPEEDWRNFIGLSLASQEKFLEWKKVTTVLGDLLAEAIEDDSIAVVSPLRLRPQNGRVHKDTIAAVKKQTLGSAWSADAVKRIVDPEIYLAMKDALGKSKVLPEDSARTLELSDGRYLEADDEVLFFPKNAASILTPRGVAEIGSTVHHARLYAVPSKRGPKLYQMRVFAGEFASIGFKKAGVDLFTAELPVWSQSYRAAPRALRDALEAGTAVYLGWLAPDDELEIPAEALHLVPCLAPPGDAVHGAFPLRGALREARWRVSGFEATELVNLKPALLATEEFSQADLQALTSFPGGKPYFGAQGWRLSVSKLLELRPTVVRRTASGAPRWRSEGSLPTSWRLEDVLAGVIAPLEHHHHHH

SEQ ID NO: 839 - protein, 1140 aa, synthetic construct
MSTDMKNYRIGVDVGDRSVGLAAIEFDDDGLPIQKLALVTFRHDGGLDPTKNKTPMSRKETRGIARRTMRMNRERKRRLRNLDNVLENLGYSVPEGPEPETYEAWTSRALLASIKLASADELNEHLVRAVRHMARHRGWANPWWSLDQLEKASQEPSETFEIILARARELFGEKVPANPTLGMLGALAANNEVLLRPRDEKKRKTGYVRGTPLMFAQVRQGDQLAELRRICEVQGIEDQYEALRLGVFDHKHPYVPKERVGKDPLNPSTNRTIRASLEFQEFRILDSVANLRVRIGSRAKRELTEAEYDAAVEFLMDYADKEQPSWADVAEKIGVPGNRLVAPVLEDVQQKTAPYDRSSAAFEKAMGKKTEARQWWESTDDDQLRSLLIAFLVDATNDTEEAAAEAGLSELYKSWPAEEREALSNIDFEKGRVAYSQETLSKLSEYMHEYRVGLHEARKAVFGVDDTWRPPLDKLEEPTGQPAVDRVLTILRRFVLDCERQWGRPRAITVEHTRTGLMGPTQRQKILNEQKKNRADNERIRDELRESGVDNPSRAEVRRHLIVQEQECQCLYCGTMITTTTSELDHIVPRAGGGSSRRENLAAVCRACNAKKKRELFYAWAGPVKSQETIERVRQLKAFKDSKKAKMFKNQIRRLNQTEADEPIDERSLASTSYAAVAVRERLEQHFNEGLALDDKSRVVLDVYAGAVTRESRRAGGIDERILLRGERDKNRFDVRHHAVDAAVMTLLNRSVALTLEQRSQLRRAFYEQGLDKLDRDQLKPEEDWRNFIGLSLASQEKFLEWKKVTTVLGDLLAEAIEDDSIAVVSPLRLRPQNGRVHKDTIAAVKKQTLGSAWSADAVKRIVDPEIYLAMKDALGKSKVLPEDSARTLELSDGRYLEADDEVLFFPKNAASILTPRGVAEIGSTVHHARLYAVPSKRGPKLYQMRVFAGEFASIGFKKAGVDLFTAELPVWSQSYRAAPRALRDALEAGTAVCLGWLVPDDELEFPLEVLHLVPSLTPPAQSEGQAYPLRETICERRWRVSGFEDADRLNLKPVLLASEEFRHAELHALADAPGGKAYFGMQGWRLSVSKLVELRPTVIRRTASGTPRWRSEGSLPTSWRLEDVLAVVTAPLEHHHHHH

SEQ ID NO: 840 - protein, 1129 aa, synthetic construct
MSTDMKNYRIGVDVGDRSVGLAAIEFDDDGLPIQKLALVTFRHDGGLDPTKNKTPMSRKETRGIARRTMRMNRERKRRLRNLDNVLENLGYSVPEGPEPETYEAWTSRALLASIKLASADELNEHLVRAVRHMARHRGWANPWWSLDQLEKASQEPSETFEIILARARELFGEKVPANPTLGMLGALAANNEVLLRPRDEKKRKTGYVRGTPLMFAQVRQGDQLAELRRICEVQGIEDQYEALRLGVFDHKHPYVPKERVGKDPLNPSTNRTIRASLEFQEFRILDSVANLRVRIGSRAKRELTEAEYDAAVEFLMDYADKEQPSWADVAEKIGVPGNRLVAPVLEDVQQKTAPYDRSSAAFEKAMGKKTEARQWWESTDDDQLRSLLIAFLVDATNDTEEAAAEAGLSELYKSWPAEEREALSNIDFEKGRVAYSQETLSKLSEYMHEYRVGLHEARKAVFGVDDTWRPPLDKLEEPTGQPAVDRVLTILRRFVLDCERQWGRPRAITVEHTRTGLMGPTQRQKILNEQKKNRADNERIRDELRESGVDNPSRAEVRRHLIVQEQECQCLYCGTMITTTTSELDHIVPRAGGGSSRRENLAAVCRACNAKKKRELFYAWAGPVKSQETIERVRQLKAFKDSKKAKMFKNQIRRLNQTEADEPIDERSLASTSYAAVAVRERLEQHFNEGLALDDKSRVVLDVYAGAVTRESRRAGGIDERILLRGERDKNRFDVRHHAVDAAVMTLLNRSVALTLEQRSQLRRAFYEQGLDKLDRDQLKPEEDWRNFIGLSLASQEKFLEWKKVTTVLGDLLAEAIEDDSIAVVSPLRLRPQNGRVHKDTIAAVKKQTLGSAWSADAVKRIVDPEIYLAMKDALGKSKVLPEDSARTLELSDGRYLEADDEVLFFPKNAASILTPRGVAEIGSTLHHVRVYRRDDGPGKPAKFSQIRVFAGEFGTLGWRKKGVNLFTEPLPNWSEAIRCGDLKLQQEIENGSASLIGWLVPGDEIEFAPGDAILPVIEPIEGVTSSPLTENRWVITGFESDSTINLAPAYLAREGIKDQDSVPPVLDGKFWRAAINKVMRARPTIIRRSATGIPRWHDLRDGLPISWKVLPDSSPALEPRLEHHHHHH

SEQ ID NO: 841 - protein, 1124 aa, synthetic construct
MSTDMKNYRIGVDVGDRSVGLAAIEFDDDGLPIQKLALVTFRHDGGLDPTKNKTPMSRKETRGIARRTMRMNRERKRRLRNLDNVLENLGYSVPEGPEPETYEAWTSRALLASIKLASADELNEHLVRAVRHMARHRGWANPWWSLDQLEKASQEPSETFEIILARARELFGEKVPANPTLGMLGALAANNEVLLRPRDEKKRKTGYVRGTPLMFAQVRQGDQLAELRRICEVQGIEDQYEALRLGVFDHKHPYVPKERVGKDPLNPSTNRTIRASLEFQEFRILDSVANLRVRIGSRAKRELTEAEYDAAVEFLMDYADKEQPSWADVAEKIGVPGNRLVAPVLEDVQQKTAPYDRSSAAFEKAMGKKTEARQWWESTDDDQLRSLLIAFLVDATNDTEEAAAEAGLSELYKSWPAEEREALSNIDFEKGRVAYSQETLSKLSEYMHEYRVGLHEARKAVFGVDDTWRPPLDKLEEPTGQPAVDRVLTILRRFVLDCERQWGRPRAITVEHTRTGLMGPTQRQKILNEQKKNRADNERIRDELRESGVDNPSRAEVRRHLIVQEQECQCLYCGTMITTTTSELDHIVPRAGGGSSRRENLAAVCRACNAKKKRELFYAWAGPVKSQETIERVRQLKAFKDSKKAKMFKNQIRRLNQTEADEPIDERSLASTSYAAVAVRERLEQHFNEGLALDDKSRVVLDVYAGAVTRESRRAGGIDERILLRGERDKNRFDVRHHAVDAAVMTLLNRSVALTLEQRSQLRRAFYEQGLDKLDRDQLKPEEDWRNFIGLSLASQEKFLEWKKVTTVLGDLLAEAIEDDSIAVVSPLRLRPQNGRVHKDTIAAVKKQTLGSAWSADAVKRIVDPEIYLAMKDALGKSKVLPEDSARTLELSDGRYLEADDEVLFFPKNAASILTPRGVAEIGGSIKSARVYAWKTNSGFGFGMVRVYTAEFPKIGFLKSGIDIFTAPLPANSQAMRHASAGLHRRIESGEAKQIGWIAINDEIEIKVTSFNEGEEKLPKFLQACPENRWVIKGFFSSVQISIVPSYLAAEGIDDGVPEVVQQTLREGRIPTAVNVLLSDPDTTIIRRSVLGTVRWRHDGTSSSWNPHQAAKKIFGLEHHHHHH

SEQ ID NO: 842 - protein, 1074 aa, synthetic construct
MSTDMKNYRIGVDVGDRSVGLAAIEFDDDGLPIQKLALVTFRHDGGLDPTKNKTPMSRKETRGIARRTMRMNRERKRRLRNLDNVLENLGYSVPEGPEPETYEAWTSRALLASIKLASADELNEHLVRAVRHMARHRGWANPWWSLDQLEKASQEPSETFEIILARARELFGEKVPANPTLGMLGALAANNEVLLRPRDEKKRKTGYVRGTPLMFAQVRQGDQLAELRRICEVQGIEDQYEALRLGVFDHKHPYVPKERVGKDPLNPSTNRTIRASLEFQEFRILDSVANLRVRIGSRAKRELTEAEYDAAVEFLMDYADKEQPSWADVAEKIGVPGNRLVAPVLEDVQQKTAPYDRSSAAFEKAMGKKTEARQWWESTDDDQLRSLLIAFLVDATNDTEEAAAEAGLSELYKSWPAEEREALSNIDFEKGRVAYSQETLSKLSEYMHEYRVGLHEARKAVFGVDDTWRPPLDKLEEPTGQPAVDRVLTILRRFVLDCERQWGRPRAITVEHTRTGLMGPTQRQKILNEQKKNRADNERIRDELRESGVDNPSRAEVRRHLIVQEQECQCLYCGTMITTTTSELDHIVPRAGGGSSRRENLAAVCRACNAKKKRELFYAWAGPVKSQETIERVRQLKAFKDSKKAKMFKNQIRRLNQTEADEPIDERSLASTSYAAVAVRERLEQHFNEGLALDDKSRVVLDVYAGAVTRESRRAGGIDERILLRGERDKNRFDVRHHAVDAAVMTLLNRSVALTLEQRSQLRRAFYEQGLDKLDRDQLKPEEDWRNFIGLSLASQEKFLEWKKVTTVLGDLLAEAIEDDSIAVVSPLRLRPQNGRVHKDTIAAVKKQTLGSAWSADAVKRIVDPEIYLAMKDALGKSKVLPEDSARTLELSDGRYLEADDEVLFFPKNAASILTPRGVAEINMVRIDVFRAEEKGKKKYYFIPVYVADTVKEELPNRAVLAHKPYEAWKIMKEENFIFSLYPNDLIFVDAGKEIPFKAALKGSTLDPEKKASRFLMYYKGADIATGSISGVNHDETYKARGVGIQSLREIKKCCIDVLGNISFASKEKRQTFR

SEQ ID NO: 843 - protein, 1084 aa, synthetic construct
MSTDMKNYRIGVDVGDRSVGLAAIEFDDDGLPIQKLALVTFRHDGGLDPTKNKTPMSRKETRGIARRTMRMNRERKRRLRNLDNVLENLGYSVPEGPEPETYEAWTSRALLASIKLASADELNEHLVRAVRHMARHRGWANPWWSLDQLEKASQEPSETFEIILARARELFGEKVPANPTLGMLGALAANNEVLLRPRDEKKRKTGYVRGTPLMFAQVRQGDQLAELRRICEVQGIEDQYEALRLGVFDHKHPYVPKERVGKDPLNPSTNRTIRASLEFQEFRILDSVANLRVRIGSRAKRELTEAEYDAAVEFLMDYADKEQPSWADVAEKIGVPGNRLVAPVLEDVQQKTAPYDRSSAAFEKAMGKKTEARQWWESTDDDQLRSLLIAFLVDATNDTEEAAAEAGLSELYKSWPAEEREALSNIDFEKGRVAYSQETLSKLSEYMHEYRVGLHEARKAVFGVDDTWRPPLDKLEEPTGQPAVDRVLTILRRFVLDCERQWGRPRAITVEHTRTGLMGPTQRQKILNEQKKNRADNERIRDELRESGVDNPSRAEVRRHLIVQEQECQCLYCGTMITTTTSELDHIVPRAGGGSSRRENLAAVCRACNAKKKRELFYAWAGPVKSQETIERVRQLKAFKDSKKAKMFKNQIRRLNQTEADEPIDERSLASTSYAAVAVRERLEQHFNEGLALDDKSRVVLDVYAGAVTRESRRAGGIDERILLRGERDKNRFDVRHHAVDAAVMTLLNRSVALTLEQRSQLRRAFYEQGLDKLDRDQLKPEEDWRNFIGLSLASQEKFLEWKKVTTVLGDLLAEAIEDDSIAVVSPLRLRPQNGRVHKDTIAAVKKQTLGSAWSADAVKRIVDPEIYLAMKDALGKSKVLPEDSARTLELSDGRYLEADDEVLFFPKNAASILTPRGVAEIGMVRVDVYYIPDGKKHGYYLVPVYVSDVVRKTLPNKAIVADTPYAEWPEMREEDFLFSLYKNDLIHLRKKKPAKMKVIQKESTLQKEIAVSEGNAYYISTDSATASIKIINHDNTYYTKGLGVKTLLSLEKMQVDVLGNITPAPREPRQDFSAMKRDRFARK

SEQ ID NO: 844 - protein, 1073 aa, synthetic construct
MSTDMKNYRIGVDVGDRSVGLAAIEFDDDGLPIQKLALVTFRHDGGLDPTKNKTPMSRKETRGIARRTMRMNRERKRRLRNLDNVLENLGYSVPEGPEPETYEAWTSRALLASIKLASADELNEHLVRAVRHMARHRGWANPWWSLDQLEKASQEPSETFEIILARARELFGEKVPANPTLGMLGALAANNEVLLRPRDEKKRKTGYVRGTPLMFAQVRQGDQLAELRRICEVQGIEDQYEALRLGVFDHKHPYVPKERVGKDPLNPSTNRTIRASLEFQEFRILDSVANLRVRIGSRAKRELTEAEYDAAVEFLMDYADKEQPSWADVAEKIGVPGNRLVAPVLEDVQQKTAPYDRSSAAFEKAMGKKTEARQWWESTDDDQLRSLLIAFLVDATNDTEEAAAEAGLSELYKSWPAEEREALSNIDFEKGRVAYSQETLSKLSEYMHEYRVGLHEARKAVFGVDDTWRPPLDKLEEPTGQPAVDRVLTILRRFVLDCERQWGRPRAITVEHTRTGLMGPTQRQKILNEQKKNRADNERIRDELRESGVDNPSRAEVRRHLIVQEQECQCLYCGTMITTTTSELDHIVPRAGGGSSRRENLAAVCRACNAKKKRELFYAWAGPVKSQETIERVRQLKAFKDSKKAKMFKNQIRRLNQTEADEPIDERSLASTSYAAVAVRERLEQHFNEGLALDDKSRVVLDVYAGAVTRESRRAGGIDERILLRGERDKNRFDVRHHAVDAAVMTLLNRSVALTLEQRSQLRRAFYEQGLDKLDRDQLKPEEDWRNFIGLSLASQEKFLEWKKVTTVLGDLLAEAIEDDSIAVVSPLRLRPQNGRVHKDTIAAVKKQTLGSAWSADAVKRIVDPEIYLAMKDALGKSKVLPEDSARTLELSDGRYLEADDEVLFFPKNAASILTPRGVAEIDMIRIDVFCVNKKGKKAYYFVPIYVADTVKKELPGKAVVSGKPYSAWKPMDDKDFIFSLYKNNLIYIEFNKPKSFVAEEGCTLSQTVDVKKAFLYYIKADRFAGTITVVNHDNTYKTRTGIKNTLLRFKKCVVDPLGRISFVEKEKRQRFQ

SEQ ID NO: 845 - protein, 1079 aa, synthetic construct
MSTDMKNYRIGVDVGDRSVGLAAIEFDDDGLPIQKLALVTFRHDGGLDPTKNKTPMSRKETRGIARRTMRMNRERKRRLRNLDNVLENLGYSVPEGPEPETYEAWTSRALLASIKLASADELNEHLVRAVRHMARHRGWANPWWSLDQLEKASQEPSETFEIILARARELFGEKVPANPTLGMLGALAANNEVLLRPRDEKKRKTGYVRGTPLMFAQVRQGDQLAELRRICEVQGIEDQYEALRLGVFDHKHPYVPKERVGKDPLNPSTNRTIRASLEFQEFRILDSVANLRVRIGSRAKRELTEAEYDAAVEFLMDYADKEQPSWADVAEKIGVPGNRLVAPVLEDVQQKTAPYDRSSAAFEKAMGKKTEARQWWESTDDDQLRSLLIAFLVDATNDTEEAAAEAGLSELYKSWPAEEREALSNIDFEKGRVAYSQETLSKLSEYMHEYRVGLHEARKAVFGVDDTWRPPLDKLEEPTGQPAVDRVLTILRRFVLDCERQWGRPRAITVEHTRTGLMGPTQRQKILNEQKKNRADNERIRDELRESGVDNPSRAEVRRHLIVQEQECQCLYCGTMITTTTSELDHIVPRAGGGSSRRENLAAVCRACNAKKKRELFYAWAGPVKSQETIERVRQLKAFKDSKKAKMFKNQIRRLNQTEADEPIDERSLASTSYAAVAVRERLEQHFNEGLALDDKSRVVLDVYAGAVTRESRRAGGIDERILLRGERDKNRFDVRHHAVDAAVMTLLNRSVALTLEQRSQLRRAFYEQGLDKLDRDQLKPEEDWRNFIGLSLASQEKFLEWKKVTTVLGDLLAEAIEDDSIAVVSPLRLRPQNGRVHKDTIAAVKKQTLGSAWSADAVKRIVDPEIYLAMKDALGKSKVLPEDSARTLELSDGRYLEADDEVLFFPKNAASILTPRGVAEISMIRVDIFKVQEKNGKSYYYAVPIYVADTVKSELPKKAVYRRPYDEWPEMKEADFAFSLYPNDVVYIGGKEIKMNVMPGCTLESEKSMRDEVLYFKGLDIATGTIRVVNHDGTYKQKSLGIKQLSIIEKYEVSVLGDLVKAMYSPRETFKHKAQRAK

SEQ ID NO: 846 - protein, 1073 aa, synthetic construct
MSTDMKNYRIGVDVGDRSVGLAAIEFDDDGLPIQKLALVTFRHDGGLDPTKNKTPMSRKETRGIARRTMRMNRERKRRLRNLDNVLENLGYSVPEGPEPETYEAWTSRALLASIKLASADELNEHLVRAVRHMARHRGWANPWWSLDQLEKASQEPSETFEIILARARELFGEKVPANPTLGMLGALAANNEVLLRPRDEKKRKTGYVRGTPLMFAQVRQGDQLAELRRICEVQGIEDQYEALRLGVFDHKHPYVPKERVGKDPLNPSTNRTIRASLEFQEFRILDSVANLRVRIGSRAKRELTEAEYDAAVEFLMDYADKEQPSWADVAEKIGVPGNRLVAPVLEDVQQKTAPYDRSSAAFEKAMGKKTEARQWWESTDDDQLRSLLIAFLVDATNDTEEAAAEAGLSELYKSWPAEEREALSNIDFEKGRVAYSQETLSKLSEYMHEYRVGLHEARKAVFGVDDTWRPPLDKLEEPTGQPAVDRVLTILRRFVLDCERQWGRPRAITVEHTRTGLMGPTQRQKILNEQKKNRADNERIRDELRESGVDNPSRAEVRRHLIVQEQECQCLYCGTMITTTTSELDHIVPRAGGGSSRRENLAAVCRACNAKKKRELFYAWAGPVKSQETIERVRQLKAFKDSKKAKMFKNQIRRLNQTEADEPIDERSLASTSYAAVAVRERLEQHFNEGLALDDKSRVVLDVYAGAVTRESRRAGGIDERILLRGERDKNRFDVRHHAVDAAVMTLLNRSVALTLEQRSQLRRAFYEQGLDKLDRDQLKPEEDWRNFIGLSLASQEKFLEWKKVTTVLGDLLAEAIEDDSIAVVSPLRLRPQNGRVHKDTIAAVKKQTLGSAWSADAVKRIVDPEIYLAMKDALGKSKVLPEDSARTLELSDGRYLEADDEVLFFPKNAASILTPRGVAEISMVRIDVFGVEERGKNAYYFVPIYVADTVRETLPNKAVVPNKSYNDWKFMRDEDFLFSLYPNDLIYIESLSPVSFHTVKGCTLVPKIERKEMLLYYRKAGISTASITVLNHDNTYVKESLGIKTIGKLQKCTVDILGNVHYVQKEKRLGFK

SEQ ID NO: 847 - protein, 1077 aa, synthetic construct
MSTDMKNYRIGVDVGDRSVGLAAIEFDDDGLPIQKLALVTFRHDGGLDPTKNKTPMSRKETRGIARRTMRMNRERKRRLRNLDNVLENLGYSVPEGPEPETYEAWTSRALLASIKLASADELNEHLVRAVRHMARHRGWANPWWSLDQLEKASQEPSETFEIILARARELFGEKVPANPTLGMLGALAANNEVLLRPRDEKKRKTGYVRGTPLMFAQVRQGDQLAELRRICEVQGIEDQYEALRLGVFDHKHPYVPKERVGKDPLNPSTNRTIRASLEFQEFRILDSVANLRVRIGSRAKRELTEAEYDAAVEFLMDYADKEQPSWADVAEKIGVPGNRLVAPVLEDVQQKTAPYDRSSAAFEKAMGKKTEARQWWESTDDDQLRSLLIAFLVDATNDTEEAAAEAGLSELYKSWPAEEREALSNIDFEKGRVAYSQETLSKLSEYMHEYRVGLHEARKAVFGVDDTWRPPLDKLEEPTGQPAVDRVLTILRRFVLDCERQWGRPRAITVEHTRTGLMGPTQRQKILNEQKKNRADNERIRDELRESGVDNPSRAEVRRHLIVQEQECQCLYCGTMITTTTSELDHIVPRAGGGSSRRENLAAVCRACNAKKKRELFYAWAGPVKSQETIERVRQLKAFKDSKKAKMFKNQIRRLNQTEADEPIDERSLASTSYAAVAVRERLEQHFNEGLALDDKSRVVLDVYAGAVTRESRRAGGIDERILLRGERDKNRFDVRHHAVDAAVMTLLNRSVALTLEQRSQLRRAFYEQGLDKLDRDQLKPEEDWRNFIGLSLASQEKFLEWKKVTTVLGDLLAEAIEDDSIAVVSPLRLRPQNGRVHKDTIAAVKKQTLGSAWSADAVKRIVDPEIYLAMKDALGKSKVLPEDSARTLELSDGRYLEADDEVLFFPKNAASILTPRGVAEIAMVRIDVFYVSEKGKKAYYFVPIYVADTVKKELPHKAVVAYKPCEEWKNVDDDDFIFSLYPNDLVYVRHKKSILLKASKRSTLSPQIKIKEGLFYYKGANISVGSISIINNDDTYGQHSLGIKTLECMKKANVDILGNVTFVGRENRQPFQLSKK

SEQ ID NO: 848 - protein, 1096 aa, synthetic construct
MSTDMKNYRIGVDVGDRSVGLAAIEFDDDGLPIQKLALVTFRHDGGLDPTKNKTPMSRKETRGIARRTMRMNRERKRRLRNLDNVLENLGYSVPEGPEPETYEAWTSRALLASIKLASADELNEHLVRAVRHMARHRGWANPWWSLDQLEKASQEPSETFEIILARARELFGEKVPANPTLGMLGALAANNEVLLRPRDEKKRKTGYVRGTPLMFAQVRQGDQLAELRRICEVQGIEDQYEALRLGVFDHKHPYVPKERVGKDPLNPSTNRTIRASLEFQEFRILDSVANLRVRIGSRAKRELTEAEYDAAVEFLMDYADKEQPSWADVAEKIGVPGNRLVAPVLEDVQQKTAPYDRSSAAFEKAMGKKTEARQWWESTDDDQLRSLLIAFLVDATNDTEEAAAEAGLSELYKSWPAEEREALSNIDFEKGRVAYSQETLSKLSEYMHEYRVGLHEARKAVFGVDDTWRPPLDKLEEPTGQPAVDRVLTILRRFVLDCERQWGRPRAITVEHTRTGLMGPTQRQKILNEQKKNRADNERIRDELRESGVDNPSRAEVRRHLIVQEQECQCLYCGTMITTTTSELDHIVPRAGGGSSRRENLAAVCRACNAKKKRELFYAWAGPVKSQETIERVRQLKAFKDSKKAKMFKNQIRRLNQTEADEPIDERSLASTSYAAVAVRERLEQHFNEGLALDDKSRVVLDVYAGAVTRESRRAGGIDERILLRGERDKNRFDVRHHAVDAAVMTLLNRSVALTLEQRSQLRRAFYEQGLDKLDRDQLKPEEDWRNFIGLSLASQEKFLEWKKVTTVLGDLLAEAIEDDSIAVVSPLRLRPQNGRVHKDTIAAVKKQTLGSAWSADAVKRIVDPEIYLAMKDALGKSKVLPEDSARTLELSDGRYLEADDEVLFFPKNAASILTPRGVAEISMVRVDVFYRAEGKGKGYYLVPVYVADTVKDELPVKAVTRRKAYKDWDEMKSDEFLFSLYKDDLLLVRSAKDIELSFLGRKGESGNLLTTYKTREFLCYYQGTNRAACSITICNQDNTYAKESMGIKTLALLKKMQVDVLGQVSEAPAEKRQGFKQMKKDPHRRCGKNVSAPDD

SEQ ID NO: 849 - protein, 1069 aa, synthetic construct
MSTDMKNYRIGVDVGDRSVGLAAIEFDDDGLPIQKLALVTFRHDGGLDPTKNKTPMSRKETRGIARRTMRMNRERKRRLRNLDNVLENLGYSVPEGPEPETYEAWTSRALLASIKLASADELNEHLVRAVRHMARHRGWANPWWSLDQLEKASQEPSETFEIILARARELFGEKVPANPTLGMLGALAANNEVLLRPRDEKKRKTGYVRGTPLMFAQVRQGDQLAELRRICEVQGIEDQYEALRLGVFDHKHPYVPKERVGKDPLNPSTNRTIRASLEFQEFRILDSVANLRVRIGSRAKRELTEAEYDAAVEFLMDYADKEQPSWADVAEKIGVPGNRLVAPVLEDVQQKTAPYDRSSAAFEKAMGKKTEARQWWESTDDDQLRSLLIAFLVDATNDTEEAAAEAGLSELYKSWPAEEREALSNIDFEKGRVAYSQETLSKLSEYMHEYRVGLHEARKAVFGVDDTWRPPLDKLEEPTGQPAVDRVLTILRRFVLDCERQWGRPRAITVEHTRTGLMGPTQRQKILNEQKKNRADNERIRDELRESGVDNPSRAEVRRHLIVQEQECQCLYCGTMITTTTSELDHIVPRAGGGSSRRENLAAVCRACNAKKKRELFYAWAGPVKSQETIERVRQLKAFKDSKKAKMFKNQIRRLNQTEADEPIDERSLASTSYAAVAVRERLEQHFNEGLALDDKSRVVLDVYAGAVTRESRRAGGIDERILLRGERDKNRFDVRHHAVDAAVMTLLNRSVALTLEQRSQLRRAFYEQGLDKLDRDQLKPEEDWRNFIGLSLASQEKFLEWKKVTTVLGDLLAEAIEDDSIAVVSPLRLRPQNGRVHKDTIAAVKKQTLGSAWSADAVKRIVDPEIYLAMKDALGKSKVLPEDSARTLELSDGRYLEADDEVLFFPKNAASILTPRGVAEIDMLRIDIFKTADGYYWVPIYVNDTVKPNLPNKAVLAAKPLDLWIEMQDDDFIFSLYSNDLVRFVHKTGTNFNCWDESKINLKESFMYYIKANINNAALEVVSHDRSYSKSSLGIKSLVAFEKWNVDILGNRSLVKKETRQYFPGQTK

SEQ ID NO: 850 - protein, 1071 aa, synthetic construct
MSTDMKNYRIGVDVGDRSVGLAAIEFDDDGLPIQKLALVTFRHDGGLDPTKNKTPMSRKETRGIARRTMRMNRERKRRLRNLDNVLENLGYSVPEGPEPETYEAWTSRALLASIKLASADELNEHLVRAVRHMARHRGWANPWWSLDQLEKASQEPSETFEIILARARELFGEKVPANPTLGMLGALAANNEVLLRPRDEKKRKTGYVRGTPLMFAQVRQGDQLAELRRICEVQGIEDQYEALRLGVFDHKHPYVPKERVGKDPLNPSTNRTIRASLEFQEFRILDSVANLRVRIGSRAKRELTEAEYDAAVEFLMDYADKEQPSWADVAEKIGVPGNRLVAPVLEDVQQKTAPYDRSSAAFEKAMGKKTEARQWWESTDDDQLRSLLIAFLVDATNDTEEAAAEAGLSELYKSWPAEEREALSNIDFEKGRVAYSQETLSKLSEYMHEYRVGLHEARKAVFGVDDTWRPPLDKLEEPTGQPAVDRVLTILRRFVLDCERQWGRPRAITVEHTRTGLMGPTQRQKILNEQKKNRADNERIRDELRESGVDNPSRAEVRRHLIVQEQECQCLYCGTMITTTTSELDHIVPRAGGGSSRRENLAAVCRACNAKKKRELFYAWAGPVKSQETIERVRQLKAFKDSKKAKMFKNQIRRLNQTEADEPIDERSLASTSYAAVAVRERLEQHFNEGLALDDKSRVVLDVYAGAVTRESRRAGGIDERILLRGERDKNRFDVRHHAVDAAVMTLLNRSVALTLEQRSQLRRAFYEQGLDKLDRDQLKPEEDWRNFIGLSLASQEKFLEWKKVTTVLGDLLAEAIEDDSIAVVSPLRLRPQNGRVHKDTIAAVKKQTLGSAWSADAVKRIVDPEIYLAMKDALGKSKVLPEDSARTLELSDGRYLEADDEVLFFPKNAASILTPRGVAEISMVRVDVFFVEGEGYYLVPIYVSDTVKKELPNKAIVAHKPYEEWKEMREENYVFSLYQNDLIGIKLKKEMKFSLVQKNSTLPKNINVKDGLFYYKGTNISGANISVINNDNTYTVESLGVKRIPVIEKYQVDVLGNVSKVGKEKRVRFQ

SEQ ID NO: 851 - protein, 1071 aa, synthetic construct
MSTDMKNYRIGVDVGDRSVGLAAIEFDDDGLPIQKLALVTFRHDGGLDPTKNKTPMSRKETRGIARRTMRMNRERKRRLRNLDNVLENLGYSVPEGPEPETYEAWTSRALLASIKLASADELNEHLVRAVRHMARHRGWANPWWSLDQLEKASQEPSETFEIILARARELFGEKVPANPTLGMLGALAANNEVLLRPRDEKKRKTGYVRGTPLMFAQVRQGDQLAELRRICEVQGIEDQYEALRLGVFDHKHPYVPKERVGKDPLNPSTNRTIRASLEFQEFRILDSVANLRVRIGSRAKRELTEAEYDAAVEFLMDYADKEQPSWADVAEKIGVPGNRLVAPVLEDVQQKTAPYDRSSAAFEKAMGKKTEARQWWESTDDDQLRSLLIAFLVDATNDTEEAAAEAGLSELYKSWPAEEREALSNIDFEKGRVAYSQETLSKLSEYMHEYRVGLHEARKAVFGVDDTWRPPLDKLEEPTGQPAVDRVLTILRRFVLDCERQWGRPRAITVEHTRTGLMGPTQRQKILNEQKKNRADNERIRDELRESGVDNPSRAEVRRHLIVQEQECQCLYCGTMITTTTSELDHIVPRAGGGSSRRENLAAVCRACNAKKKRELFYAWAGPVKSQETIERVRQLKAFKDSKKAKMFKNQIRRLNQTEADEPIDERSLASTSYAAVAVRERLEQHFNEGLALDDKSRVVLDVYAGAVTRESRRAGGIDERILLRGERDKNRFDVRHHAVDAAVMTLLNRSVALTLEQRSQLRRAFYEQGLDKLDRDQLKPEEDWRNFIGLSLASQEKFLEWKKVTTVLGDLLAEAIEDDSIAVVSPLRLRPQNGRVHKDTIAAVKKQTLGSAWSADAVKRIVDPEIYLAMKDALGKSKVLPEDSARTLELSDGRYLEADDEVLFFPKNAASILTPRGVAEISMVRTDVFYVDGEGYYLVPIYVADTVKKELPNKAIVAYKPYEQWKEMSDKNFLFSLYPNDLIHIVSKKDMKFSLVNKDATLAKNCVSKDAFVYFKGTDIATASIAAINHDNTYKLRGLGVKSLLSIEKCQVDVLGNITKAGREKRMGFR

SEQ ID NO: 852 - protein, 1067 aa, synthetic construct
MSTDMKNYRIGVDVGDRSVGLAAIEFDDDGLPIQKLALVTFRHDGGLDPTKNKTPMSRKETRGIARRTMRMNRERKRRLRNLDNVLENLGYSVPEGPEPETYEAWTSRALLASIKLASADELNEHLVRAVRHMARHRGWANPWWSLDQLEKASQEPSETFEIILARARELFGEKVPANPTLGMLGALAANNEVLLRPRDEKKRKTGYVRGTPLMFAQVRQGDQLAELRRICEVQGIEDQYEALRLGVFDHKHPYVPKERVGKDPLNPSTNRTIRASLEFQEFRILDSVANLRVRIGSRAKRELTEAEYDAAVEFLMDYADKEQPSWADVAEKIGVPGNRLVAPVLEDVQQKTAPYDRSSAAFEKAMGKKTEARQWWESTDDDQLRSLLIAFLVDATNDTEEAAAEAGLSELYKSWPAEEREALSNIDFEKGRVAYSQETLSKLSEYMHEYRVGLHEARKAVFGVDDTWRPPLDKLEEPTGQPAVDRVLTILRRFVLDCERQWGRPRAITVEHTRTGLMGPTQRQKILNEQKKNRADNERIRDELRESGVDNPSRAEVRRHLIVQEQECQCLYCGTMITTTTSELDHIVPRAGGGSSRRENLAAVCRACNAKKKRELFYAWAGPVKSQETIERVRQLKAFKDSKKAKMFKNQIRRLNQTEADEPIDERSLASTSYAAVAVRERLEQHFNEGLALDDKSRVVLDVYAGAVTRESRRAGGIDERILLRGERDKNRFDVRHHAVDAAVMTLLNRSVALTLEQRSQLRRAFYEQGLDKLDRDQLKPEEDWRNFIGLSLASQEKFLEWKKVTTVLGDLLAEAIEDDSIAVVSPLRLRPQNGRVHKDTIAAVKKQTLGSAWSADAVKRIVDPEIYLAMKDALGKSKVLPEDSARTLELSDGRYLEADDEVLFFPKNAASILTPRGVAEIDMIRTDVFRTEDGYYLVPIYVADTVKNELPHKAIVQGGEWKVMNDEDFLFSLYRNDLIKIKSNSDVTFSLMNESSSLPKTESLREEFVYFKETSINTASIRVVTHDNCYIKKSLGVKNLQSLEKYQVDVLGNVSKVKKEKRMGFR

SEQ ID NO: 853 - protein, 1071 aa, synthetic construct
MSTDMKNYRIGVDVGDRSVGLAAIEFDDDGLPIQKLALVTFRHDGGLDPTKNKTPMSRKETRGIARRTMRMNRERKRRLRNLDNVLENLGYSVPEGPEPETYEAWTSRALLASIKLASADELNEHLVRAVRHMARHRGWANPWWSLDQLEKASQEPSETFEIILARARELFGEKVPANPTLGMLGALAANNEVLLRPRDEKKRKTGYVRGTPLMFAQVRQGDQLAELRRICEVQGIEDQYEALRLGVFDHKHPYVPKERVGKDPLNPSTNRTIRASLEFQEFRILDSVANLRVRIGSRAKRELTEAEYDAAVEFLMDYADKEQPSWADVAEKIGVPGNRLVAPVLEDVQQKTAPYDRSSAAFEKAMGKKTEARQWWESTDDDQLRSLLIAFLVDATNDTEEAAAEAGLSELYKSWPAEEREALSNIDFEKGRVAYSQETLSKLSEYMHEYRVGLHEARKAVFGVDDTWRPPLDKLEEPTGQPAVDRVLTILRRFVLDCERQWGRPRAITVEHTRTGLMGPTQRQKILNEQKKNRADNERIRDELRESGVDNPSRAEVRRHLIVQEQECQCLYCGTMITTTTSELDHIVPRAGGGSSRRENLAAVCRACNAKKKRELFYAWAGPVKSQETIERVRQLKAFKDSKKAKMFKNQIRRLNQTEADEPIDERSLASTSYAAVAVRERLEQHFNEGLALDDKSRVVLDVYAGAVTRESRRAGGIDERILLRGERDKNRFDVRHHAVDAAVMTLLNRSVALTLEQRSQLRRAFYEQGLDKLDRDQLKPEEDWRNFIGLSLASQEKFLEWKKVTTVLGDLLAEAIEDDSIAVVSPLRLRPQNGRVHKDTIAAVKKQTLGSAWSADAVKRIVDPEIYLAMKDALGKSKVLPEDSARTLELSDGRYLEADDEVLFFPKNAASILTPRGVAEISIIRTDVFYVEGEGYYLVPIYVSDTVKKVLPNKAVVGSKSYNDWKVMNDENFIFSLYPSDLIRVVSNTVKKFSLVNKNSTLKDTIDSKDIFLYFKKTKIANAAITVINHDNTYTIPSLGVKELLKLEKYQVDVLGNKSKCGKEKRMGFN

SEQ ID NO: 854 - protein, 1066 aa, synthetic construct
MSTDMKNYRIGVDVGDRSVGLAAIEFDDDGLPIQKLALVTFRHDGGLDPTKNKTPMSRKETRGIARRTMRMNRERKRRLRNLDNVLENLGYSVPEGPEPETYEAWTSRALLASIKLASADELNEHLVRAVRHMARHRGWANPWWSLDQLEKASQEPSETFEIILARARELFGEKVPANPTLGMLGALAANNEVLLRPRDEKKRKTGYVRGTPLMFAQVRQGDQLAELRRICEVQGIEDQYEALRLGVFDHKHPYVPKERVGKDPLNPSTNRTIRASLEFQEFRILDSVANLRVRIGSRAKRELTEAEYDAAVEFLMDYADKEQPSWADVAEKIGVPGNRLVAPVLEDVQQKTAPYDRSSAAFEKAMGKKTEARQWWESTDDDQLRSLLIAFLVDATNDTEEAAAEAGLSELYKSWPAEEREALSNIDFEKGRVAYSQETLSKLSEYMHEYRVGLHEARKAVFGVDDTWRPPLDKLEEPTGQPAVDRVLTILRRFVLDCERQWGRPRAITVEHTRTGLMGPTQRQKILNEQKKNRADNERIRDELRESGVDNPSRAEVRRHLIVQEQECQCLYCGTMITTTTSELDHIVPRAGGGSSRRENLAAVCRACNAKKKRELFYAWAGPVKSQETIERVRQLKAFKDSKKAKMFKNQIRRLNQTEADEPIDERSLASTSYAAVAVRERLEQHFNEGLALDDKSRVVLDVYAGAVTRESRRAGGIDERILLRGERDKNRFDVRHHAVDAAVMTLLNRSVALTLEQRSQLRRAFYEQGLDKLDRDQLKPEEDWRNFIGLSLASQEKFLEWKKVTTVLGDLLAEAIEDDSIAVVSPLRLRPQNGRVHKDTIAAVKKQTLGSAWSADAVKRIVDPEIYLAMKDALGKSKVLPEDSARTLELSDGRYLEADDEVLFFPKNAASILTPRGVAEINMVRIDLYYVEGEGYYFIPIYISDLIKKELPKKACVPHKEYHDWKNMKDEDFLYSIYPNDLLYIKSSTPKKFTKKKGEKKDSFEAEEAFVYYREAKISGATITVVTHDNNYTIQSLGVKTLSRIEKYHVDVLGNKYKAAVEERK

SEQ ID NO: 855 - protein, 1071 aa, synthetic construct
MSTDMKNYRIGVDVGDRSVGLAAIEFDDDGLPIQKLALVTFRHDGGLDPTKNKTPMSRKETRGIARRTMRMNRERKRRLRNLDNVLENLGYSVPEGPEPETYEAWTSRALLASIKLASADELNEHLVRAVRHMARHRGWANPWWSLDQLEKASQEPSETFEIILARARELFGEKVPANPTLGMLGALAANNEVLLRPRDEKKRKTGYVRGTPLMFAQVRQGDQLAELRRICEVQGIEDQYEALRLGVFDHKHPYVPKERVGKDPLNPSTNRTIRASLEFQEFRILDSVANLRVRIGSRAKRELTEAEYDAAVEFLMDYADKEQPSWADVAEKIGVPGNRLVAPVLEDVQQKTAPYDRSSAAFEKAMGKKTEARQWWESTDDDQLRSLLIAFLVDATNDTEEAAAEAGLSELYKSWPAEEREALSNIDFEKGRVAYSQETLSKLSEYMHEYRVGLHEARKAVFGVDDTWRPPLDKLEEPTGQPAVDRVLTILRRFVLDCERQWGRPRAITVEHTRTGLMGPTQRQKILNEQKKNRADNERIRDELRESGVDNPSRAEVRRHLIVQEQECQCLYCGTMITTTTSELDHIVPRAGGGSSRRENLAAVCRACNAKKKRELFYAWAGPVKSQETIERVRQLKAFKDSKKAKMFKNQIRRLNQTEADEPIDERSLASTSYAAVAVRERLEQHFNEGLALDDKSRVVLDVYAGAVTRESRRAGGIDERILLRGERDKNRFDVRHHAVDAAVMTLLNRSVALTLEQRSQLRRAFYEQGLDKLDRDQLKPEEDWRNFIGLSLASQEKFLEWKKVTTVLGDLLAEAIEDDSIAVVSPLRLRPQNGRVHKDTIAAVKKQTLGSAWSADAVKRIVDPEIYLAMKDALGKSKVLPEDSARTLELSDGRYLEADDEVLFFPKNAASILTPRGVAEISMVRVDVFFVEGEGYYMVPIYVSDTVKPELPNKAIIANKPYTEWKEMKEQDFLFSLYPNDLIRIKFNKEKQFSLVQKDSTLAKNLLLSEGYFYYKKASISSASITIINNDNTYTVASLGVKRIPLIEKYQVDVLGNIQKVGKEKRMRFR

SEQ ID NO: 856 - protein, 1071 aa, synthetic construct
MSTDMKNYRIGVDVGDRSVGLAAIEFDDDGLPIQKLALVTFRHDGGLDPTKNKTPMSRKETRGIARRTMRMNRERKRRLRNLDNVLENLGYSVPEGPEPETYEAWTSRALLASIKLASADELNEHLVRAVRHMARHRGWANPWWSLDQLEKASQEPSETFEIILARARELFGEKVPANPTLGMLGALAANNEVLLRPRDEKKRKTGYVRGTPLMFAQVRQGDQLAELRRICEVQGIEDQYEALRLGVFDHKHPYVPKERVGKDPLNPSTNRTIRASLEFQEFRILDSVANLRVRIGSRAKRELTEAEYDAAVEFLMDYADKEQPSWADVAEKIGVPGNRLVAPVLEDVQQKTAPYDRSSAAFEKAMGKKTEARQWWESTDDDQLRSLLIAFLVDATNDTEEAAAEAGLSELYKSWPAEEREALSNIDFEKGRVAYSQETLSKLSEYMHEYRVGLHEARKAVFGVDDTWRPPLDKLEEPTGQPAVDRVLTILRRFVLDCERQWGRPRAITVEHTRTGLMGPTQRQKILNEQKKNRADNERIRDELRESGVDNPSRAEVRRHLIVQEQECQCLYCGTMITTTTSELDHIVPRAGGGSSRRENLAAVCRACNAKKKRELFYAWAGPVKSQETIERVRQLKAFKDSKKAKMFKNQIRRLNQTEADEPIDERSLASTSYAAVAVRERLEQHFNEGLALDDKSRVVLDVYAGAVTRESRRAGGIDERILLRGERDKNRFDVRHHAVDAAVMTLLNRSVALTLEQRSQLRRAFYEQGLDKLDRDQLKPEEDWRNFIGLSLASQEKFLEWKKVTTVLGDLLAEAIEDDSIAVVSPLRLRPQNGRVHKDTIAAVKKQTLGSAWSADAVKRIVDPEIYLAMKDALGKSKVLPEDSARTLELSDGRYLEADDEVLFFPKNAASILTPRGVAEISMVRVDVFFVENEGYYLVPVYVSDTVALDLPNRAIVGGKPYSKWKEMDNDNFVFSLYPNDLIKVKSKRDMKFNLVNPDSTLAKNYTARESMLYYKGTDISTAAITAINHDNTYKLRGLGVKSLLSIEKYSVDVLGNKTKVNKEKRMGFV

SEQ ID NO: 857 - protein, 1071 aa, synthetic construct
MSTDMKNYRIGVDVGDRSVGLAAIEFDDDGLPIQKLALVTFRHDGGLDPTKNKTPMSRKETRGIARRTMRMNRERKRRLRNLDNVLENLGYSVPEGPEPETYEAWTSRALLASIKLASADELNEHLVRAVRHMARHRGWANPWWSLDQLEKASQEPSETFEIILARARELFGEKVPANPTLGMLGALAANNEVLLRPRDEKKRKTGYVRGTPLMFAQVRQGDQLAELRRICEVQGIEDQYEALRLGVFDHKHPYVPKERVGKDPLNPSTNRTIRASLEFQEFRILDSVANLRVRIGSRAKRELTEAEYDAAVEFLMDYADKEQPSWADVAEKIGVPGNRLVAPVLEDVQQKTAPYDRSSAAFEKAMGKKTEARQWWESTDDDQLRSLLIAFLVDATNDTEEAAAEAGLSELYKSWPAEEREALSNIDFEKGRVAYSQETLSKLSEYMHEYRVGLHEARKAVFGVDDTWRPPLDKLEEPTGQPAVDRVLTILRRFVLDCERQWGRPRAITVEHTRTGLMGPTQRQKILNEQKKNRADNERIRDELRESGVDNPSRAEVRRHLIVQEQECQCLYCGTMITTTTSELDHIVPRAGGGSSRRENLAAVCRACNAKKKRELFYAWAGPVKSQETIERVRQLKAFKDSKKAKMFKNQIRRLNQTEADEPIDERSLASTSYAAVAVRERLEQHFNEGLALDDKSRVVLDVYAGAVTRESRRAGGIDERILLRGERDKNRFDVRHHAVDAAVMTLLNRSVALTLEQRSQLRRAFYEQGLDKLDRDQLKPEEDWRNFIGLSLASQEKFLEWKKVTTVLGDLLAEAIEDDSIAVVSPLRLRPQNGRVHKDTIAAVKKQTLGSAWSADAVKRIVDPEIYLAMKDALGKSKVLPEDSARTLELSDGRYLEADDEVLFFPKNAASILTPRGVAEISMVRVDVFFVEGEGYYLVPIYVADTVKKELPQKAIIANKTYENWKEMKEENFVFSLYPNDLIRIKSKKEMKFNLVNKESTLAPHYQSKDAYVYYKGSDISTAAITAITHDNTYKLRGLGVKTLLAIEKYQVDVLGNIIKIGREKRMRFR

SEQ ID NO: 858 - protein, 1057 aa, synthetic construct
MSTDMKNYRIGVDVGDRSVGLAAIEFDDDGLPIQKLALVTFRHDGGLDPTKNKTPMSRKETRGIARRTMRMNRERKRRLRNLDNVLENLGYSVPEGPEPETYEAWTSRALLASIKLASADELNEHLVRAVRHMARHRGWANPWWSLDQLEKASQEPSETFEIILARARELFGEKVPANPTLGMLGALAANNEVLLRPRDEKKRKTGYVRGTPLMFAQVRQGDQLAELRRICEVQGIEDQYEALRLGVFDHKHPYVPKERVGKDPLNPSTNRTIRASLEFQEFRILDSVANLRVRIGSRAKRELTEAEYDAAVEFLMDYADKEQPSWADVAEKIGVPGNRLVAPVLEDVQQKTAPYDRSSAAFEKAMGKKTEARQWWESTDDDQLRSLLIAFLVDATNDTEEAAAEAGLSELYKSWPAEEREALSNIDFEKGRVAYSQETLSKLSEYMHEYRVGLHEARKAVFGVDDTWRPPLDKLEEPTGQPAVDRVLTILRRFVLDCERQWGRPRAITVEHTRTGLMGPTQRQKILNEQKKNRADNERIRDELRESGVDNPSRAEVRRHLIVQEQECQCLYCGTMITTTTSELDHIVPRAGGGSSRRENLAAVCRACNAKKKRELFYAWAGPVKSQETIERVRQLKAFKDSKKAKMFKNQIRRLNQTEADEPIDERSLASTSYAAVAVRERLEQHFNEGLALDDKSRVVLDVYAGAVTRESRRAGGIDERILLRGERDKNRFDVRHHAVDAAVMTLLNRSVALTLEQRSQLRRAFYEQGLDKLDRDQLKPEEDWRNFIGLSLASQEKFLEWKKVTTVLGDLLAEAIEDDSIAVVSPLRLRPQNGRVHKDTIAAVKKQTLGSAWSADAVKRIVDPEIYLAMKDALGKSKVLPEDSARTLELSDGRYLEADDEVLFFPKNAASILTPRGVAEIDMLRIDVFKKGDGYYWVPIYVADTVKETLPNKACVHSKPYELWKEMDDNDFIFSLYPNDLIRFIPNNGEEAFMYYIKAGISTASITVESHDRSQSIPSLGVKTLKILEKWNVDVLGNRTLVKNEKRQYYPGQTTR

SEQ ID NO: 859 - protein, 1070 aa, synthetic construct
MSTDMKNYRIGVDVGDRSVGLAAIEFDDDGLPIQKLALVTFRHDGGLDPTKNKTPMSRKETRGIARRTMRMNRERKRRLRNLDNVLENLGYSVPEGPEPETYEAWTSRALLASIKLASADELNEHLVRAVRHMARHRGWANPWWSLDQLEKASQEPSETFEIILARARELFGEKVPANPTLGMLGALAANNEVLLRPRDEKKRKTGYVRGTPLMFAQVRQGDQLAELRRICEVQGIEDQYEALRLGVFDHKHPYVPKERVGKDPLNPSTNRTIRASLEFQEFRILDSVANLRVRIGSRAKRELTEAEYDAAVEFLMDYADKEQPSWADVAEKIGVPGNRLVAPVLEDVQQKTAPYDRSSAAFEKAMGKKTEARQWWESTDDDQLRSLLIAFLVDATNDTEEAAAEAGLSELYKSWPAEEREALSNIDFEKGRVAYSQETLSKLSEYMHEYRVGLHEARKAVFGVDDTWRPPLDKLEEPTGQPAVDRVLTILRRFVLDCERQWGRPRAITVEHTRTGLMGPTQRQKILNEQKKNRADNERIRDELRESGVDNPSRAEVRRHLIVQEQECQCLYCGTMITTTTSELDHIVPRAGGGSSRRENLAAVCRACNAKKKRELFYAWAGPVKSQETIERVRQLKAFKDSKKAKMFKNQIRRLNQTEADEPIDERSLASTSYAAVAVRERLEQHFNEGLALDDKSRVVLDVYAGAVTRESRRAGGIDERILLRGERDKNRFDVRHHAVDAAVMTLLNRSVALTLEQRSQLRRAFYEQGLDKLDRDQLKPEEDWRNFIGLSLASQEKFLEWKKVTTVLGDLLAEAIEDDSIAVVSPLRLRPQNGRVHKDTIAAVKKQTLGSAWSADAVKRIVDPEIYLAMKDALGKSKVLPEDSARTLELSDGRYLEADDEVLFFPKNAASILTPRGVAEIPMVRVDVFYVAGEGYYLVPIYVSDTVKKELPNRACVANKPYSEWKVMDDKNFLFSLYNNDLVKITFKREKKFSLVNKDSTLDKEHRTKSELLYYKGTNIHTASITVITHDNTYIFEGMGVKTLISIEKYEVDVLGRVRKVNKEKRMGF

SEQ ID NO: 860 - protein, 1076 aa, synthetic construct
MSTDMKNYRIGVDVGDRSVGLAAIEFDDDGLPIQKLALVTFRHDGGLDPTKNKTPMSRKETRGIARRTMRMNRERKRRLRNLDNVLENLGYSVPEGPEPETYEAWTSRALLASIKLASADELNEHLVRAVRHMARHRGWANPWWSLDQLEKASQEPSETFEIILARARELFGEKVPANPTLGMLGALAANNEVLLRPRDEKKRKTGYVRGTPLMFAQVRQGDQLAELRRICEVQGIEDQYEALRLGVFDHKHPYVPKERVGKDPLNPSTNRTIRASLEFQEFRILDSVANLRVRIGSRAKRELTEAEYDAAVEFLMDYADKEQPSWADVAEKIGVPGNRLVAPVLEDVQQKTAPYDRSSAAFEKAMGKKTEARQWWESTDDDQLRSLLIAFLVDATNDTEEAAAEAGLSELYKSWPAEEREALSNIDFEKGRVAYSQETLSKLSEYMHEYRVGLHEARKAVFGVDDTWRPPLDKLEEPTGQPAVDRVLTILRRFVLDCERQWGRPRAITVEHTRTGLMGPTQRQKILNEQKKNRADNERIRDELRESGVDNPSRAEVRRHLIVQEQECQCLYCGTMITTTTSELDHIVPRAGGGSSRRENLAAVCRACNAKKKRELFYAWAGPVKSQETIERVRQLKAFKDSKKAKMFKNQIRRLNQTEADEPIDERSLASTSYAAVAVRERLEQHFNEGLALDDKSRVVLDVYAGAVTRESRRAGGIDERILLRGERDKNRFDVRHHAVDAAVMTLLNRSVALTLEQRSQLRRAFYEQGLDKLDRDQLKPEEDWRNFIGLSLASQEKFLEWKKVTTVLGDLLAEAIEDDSIAVVSPLRLRPQNGRVHKDTIAAVKKQTLGSAWSADAVKRIVDPEIYLAMKDALGKSKVLPEDSARTLELSDGRYLEADDEVLFFPKNAASILTPRGVAEISMVRIDVFHITAGKGAGYYLVPIYVADTKKDKLPSKAIVAHKKYDEWKLMDEKDFVFSLYPNDLIYVEKKGNIELSLDKKIEKDSTLPKKISSPQGYFYYVKAGIGDGSVQIKSHDGVYLLPSMGVKTLKLLRKCVVDELGNISFVGKEKRQHF

SEQ ID NO: 861 - protein, 1075 aa, synthetic construct
MSTDMKNYRIGVDVGDRSVGLAAIEFDDDGLPIQKLALVTFRHDGGLDPTKNKTPMSRKETRGIARRTMRMNRERKRRLRNLDNVLENLGYSVPEGPEPETYEAWTSRALLASIKLASADELNEHLVRAVRHMARHRGWANPWWSLDQLEKASQEPSETFEIILARARELFGEKVPANPTLGMLGALAANNEVLLRPRDEKKRKTGYVRGTPLMFAQVRQGDQLAELRRICEVQGIEDQYEALRLGVFDHKHPYVPKERVGKDPLNPSTNRTIRASLEFQEFRILDSVANLRVRIGSRAKRELTEAEYDAAVEFLMDYADKEQPSWADVAEKIGVPGNRLVAPVLEDVQQKTAPYDRSSAAFEKAMGKKTEARQWWESTDDDQLRSLLIAFLVDATNDTEEAAAEAGLSELYKSWPAEEREALSNIDFEKGRVAYSQETLSKLSEYMHEYRVGLHEARKAVFGVDDTWRPPLDKLEEPTGQPAVDRVLTILRRFVLDCERQWGRPRAITVEHTRTGLMGPTQRQKILNEQKKNRADNERIRDELRESGVDNPSRAEVRRHLIVQEQECQCLYCGTMITTTTSELDHIVPRAGGGSSRRENLAAVCRACNAKKKRELFYAWAGPVKSQETIERVRQLKAFKDSKKAKMFKNQIRRLNQTEADEPIDERSLASTSYAAVAVRERLEQHFNEGLALDDKSRVVLDVYAGAVTRESRRAGGIDERILLRGERDKNRFDVRHHAVDAAVMTLLNRSVALTLEQRSQLRRAFYEQGLDKLDRDQLKPEEDWRNFIGLSLASQEKFLEWKKVTTVLGDLLAEAIEDDSIAVVSPLRLRPQNGRVHKDTIAAVKKQTLGSAWSADAVKRIVDPEIYLAMKDALGKSKVLPEDSARTLELSDGRYLEADDEVLFFPKNAASILTPRGVAEIDMIRIDVFQVKEGKDKGFYFVPIYVADKVKDKLPSRAVIQGKDPKDWKEMKDEDFIYSLYPNDLIYFSSKKIVGFKNNNKSSEILGVDMSEGYLYYTGADISTASINVDFVDNSFSKHGLGVKTLKEFRKFTIDVLGNIHEVKKEKRLVFGRK

SEQ ID NO: 862 - protein, 1093 aa, synthetic construct
MSTDMKNYRIGVDVGDRSVGLAAIEFDDDGLPIQKLALVTFRHDGGLDPTKNKTPMSRKETRGIARRTMRMNRERKRRLRNLDNVLENLGYSVPEGPEPETYEAWTSRALLASIKLASADELNEHLVRAVRHMARHRGWANPWWSLDQLEKASQEPSETFEIILARARELFGEKVPANPTLGMLGALAANNEVLLRPRDEKKRKTGYVRGTPLMFAQVRQGDQLAELRRICEVQGIEDQYEALRLGVFDHKHPYVPKERVGKDPLNPSTNRTIRASLEFQEFRILDSVANLRVRIGSRAKRELTEAEYDAAVEFLMDYADKEQPSWADVAEKIGVPGNRLVAPVLEDVQQKTAPYDRSSAAFEKAMGKKTEARQWWESTDDDQLRSLLIAFLVDATNDTEEAAAEAGLSELYKSWPAEEREALSNIDFEKGRVAYSQETLSKLSEYMHEYRVGLHEARKAVFGVDDTWRPPLDKLEEPTGQPAVDRVLTILRRFVLDCERQWGRPRAITVEHTRTGLMGPTQRQKILNEQKKNRADNERIRDELRESGVDNPSRAEVRRHLIVQEQECQCLYCGTMITTTTSELDHIVPRAGGGSSRRENLAAVCRACNAKKKRELFYAWAGPVKSQETIERVRQLKAFKDSKKAKMFKNQIRRLNQTEADEPIDERSLASTSYAAVAVRERLEQHFNEGLALDDKSRVVLDVYAGAVTRESRRAGGIDERILLRGERDKNRFDVRHHAVDAAVMTLLNRSVALTLEQRSQLRRAFYEQGLDKLDRDQLKPEEDWRNFIGLSLASQEKFLEWKKVTTVLGDLLAEAIEDDSIAVVSPLRLRPQNGRVHKDTIAAVKKQTLGSAWSADAVKRIVDPEIYLAMKDALGKSKVLPEDSARTLELSDGRYLEADDEVLFFPKNAASILTPRGVAEIGMVRVDVFFIPEGKDRGYYLVPVYTSDVVRGELPMRAVVQGKSYAEWKLMREEDFIFSLYPNDLVYIEHEKGVKVKIQKKLREISTLPREKTMTSGLFYYRTMGIAVASIHIYAPDGVYVQESLGVKTLKEFKKWTIDILGGEPHPVQKEKRQDFASVKRDPHAAKSTSSG

SEQ ID NO: 863 - RNA, 108 nt, synthetic construct
  source 1..108: mol_type = other RNA
nnnnnnnnnnnnnnnnnnnngttgagaatcgaaagattcttaataaggcatccttccgatgctgacttctcaccgtccgttttccaataggagcgggcggtatgtttt

SEQ ID NO: 864-919 - skipped (56 entries)

SEQ ID NO: 920 - DNA, 7579 bp, synthetic construct; identical to SEQ ID NO: 105
  source 1..7579: mol_type = other DNA

SEQ ID NO: 921 - DNA, 2356 bp, synthetic construct; identical to SEQ ID NO: 106
  source 1..2356: mol_type = other DNA

SEQ ID NO: 922 - RNA, 110 nt, synthetic construct
  source 1..110: mol_type = other RNA
  modified_base 1..3: mod_base = OTHER; note = 2'O-Methyl ribonucleotide
  modified_base 1..3: mod_base = OTHER; note = Phosphorothioate linkage
  modified_base 108..110: mod_base = OTHER; note = 2'O-Methyl ribonucleotide
  modified_base 107..109: mod_base = OTHER; note = Phosphorothioate linkage
cctcttgtcccacagatatccagttgagaatcgaaagattcttaataaggcatccttccgatgctgacttctcaccgtccgttttccaataggagcgggcggtatgtttt

SEQ ID NO: 923 - RNA, 110 nt, synthetic construct
  source 1..110: mol_type = other RNA
  modified_base 1..3: mod_base = OTHER; note = 2'O-Methyl ribonucleotide
  modified_base 1..3: mod_base = OTHER; note = Phosphorothioate linkage
  modified_base 108..110: mod_base = OTHER; note = 2'O-Methyl ribonucleotide
  modified_base 107..109: mod_base = OTHER; note = Phosphorothioate linkage
gtcccacagatatccagaacccgttgagaatcgaaagattcttaataaggcatccttccgatgctgacttctcaccgtccgttttccaataggagcgggcggtatgtttt

SEQ ID NO: 924 - RNA, 110 nt, synthetic construct
  source 1..110: mol_type = other RNA
  modified_base 1..3: mod_base = OTHER; note = 2'O-Methyl ribonucleotide
  modified_base 1..3: mod_base = OTHER; note = Phosphorothioate linkage
  modified_base 108..110: mod_base = OTHER; note = 2'O-Methyl ribonucleotide
  modified_base 107..109: mod_base = OTHER; note = Phosphorothioate linkage
gcattattccagaagacaccttgttgagaatcgaaagattcttaataaggcatccttccgatgctgacttctcaccgtccgttttccaataggagcgggcggtatgtttt

SEQ ID NO: 925 - DNA, 22 bp, Homo sapiens
  source 1..22: mol_type = genomic DNA
cctcttgtcccacagatatcca

SEQ ID NO: 926 - DNA, 22 bp, Homo sapiens
  source 1..22: mol_type = genomic DNA
gtcccacagatatccagaaccc

SEQ ID NO: 927 - DNA, 22 bp, Homo sapiens
  source 1..22: mol_type = genomic DNA
gcattattccagaagacacctt

SEQ ID NO: 928 - RNA, 110 nt, synthetic construct
  source 1..110: mol_type = other RNA
  modified_base 1..3: mod_base = OTHER; note = 2'O-Methyl ribonucleotide
  modified_base 1..3: mod_base = OTHER; note = Phosphorothioate linkage
  modified_base 108..110: mod_base = OTHER; note = 2'O-Methyl ribonucleotide
  modified_base 107..109: mod_base = OTHER; note = Phosphorothioate linkage
acgcatcccccccttccctcccgttgagaatcgaaagattcttaataaggcatccttccgatgctgacttctcaccgtccgttttccaataggagcgggcggtatgtttt

SEQ ID NO: 929 - RNA, 110 nt, synthetic construct
  source 1..110: mol_type = other RNA
  modified_base 1..3: mod_base = OTHER; note = 2'O-Methyl ribonucleotide
  modified_base 1..3: mod_base = OTHER; note = Phosphorothioate linkage
  modified_base 108..110: mod_base = OTHER; note = 2'O-Methyl ribonucleotide
  modified_base 107..109: mod_base = OTHER; note = Phosphorothioate linkage
ggggcttttctgtcaccaatccgttgagaatcgaaagattcttaataaggcatccttccgatgctgacttctcaccgtccgttttccaataggagcgggcggtatgtttt

SEQ ID NO: 930 - RNA, 110 nt, synthetic construct
  source 1..110: mol_type = other RNA
  modified_base 1..3: mod_base = OTHER; note = 2'O-Methyl ribonucleotide
  modified_base 1..3: mod_base = OTHER; note = Phosphorothioate linkage
  modified_base 108..110: mod_base = OTHER; note = 2'O-Methyl ribonucleotide
  modified_base 107..109: mod_base = OTHER; note = Phosphorothioate linkage
ctgtcaccaatcctgtccctaggttgagaatcgaaagattcttaataaggcatccttccgatgctgacttctcaccgtccgttttccaataggagcgggcggtatgtttt

SEQ ID NO: 931 - RNA, 110 nt, synthetic construct
  source 1..110: mol_type = other RNA
  modified_base 1..3: mod_base = OTHER; note = 2'O-Methyl ribonucleotide
  modified_base 1..3: mod_base = OTHER; note = Phosphorothioate linkage
  modified_base 108..110: mod_base = OTHER; note = 2'O-Methyl ribonucleotide
  modified_base 107..109: mod_base = OTHER; note = Phosphorothioate linkage
ccagaaccagagccacattaacgttgagaatcgaaagattcttaataaggcatccttccgatgctgacttctcaccgtccgttttccaataggagcgggcggtatgtttt

SEQ ID NO: 932 - RNA, 110 nt, synthetic construct
  source 1..110: mol_type = other RNA
  modified_base 1..3: mod_base = OTHER; note = 2'O-Methyl ribonucleotide
  modified_base 1..3: mod_base = OTHER; note = Phosphorothioate linkage
  modified_base 108..110: mod_base = OTHER; note = 2'O-Methyl ribonucleotide
  modified_base 107..109: mod_base = OTHER; note = Phosphorothioate linkage
tggtcccagctcggggacacaggttgagaatcgaaagattcttaataaggcatccttccgatgctgacttctcaccgtccgttttccaataggagcgggcggtatgtttt

SEQ ID NO: 933 - RNA, 110 nt, synthetic construct
  source 1..110: mol_type = other RNA
  modified_base 1..3: mod_base = OTHER; note = 2'O-Methyl ribonucleotide
  modified_base 1..3: mod_base = OTHER; note = Phosphorothioate linkage
  modified_base 108..110: mod_base = OTHER; note = 2'O-Methyl ribonucleotide
  modified_base 107..109: mod_base = OTHER; note = Phosphorothioate linkage
aagaagactagctgagctctcggttgagaatcgaaagattcttaataaggcatccttccgatgctgacttctcaccgtccgttttccaataggagcgggcggtatgtttt

SEQ ID NO: 934 - RNA, 110 nt, synthetic construct
  source 1..110: mol_type = other RNA
  modified_base 1..3: mod_base = OTHER; note = 2'O-Methyl ribonucleotide
  modified_base 1..3: mod_base = OTHER; note = Phosphorothioate linkage
  modified_base 108..110: mod_base = OTHER; note = 2'O-Methyl ribonucleotide
  modified_base 107..109: mod_base = OTHER; note = Phosphorothioate linkage
cctaagaaacgagagatggcacgttgagaatcgaaagattcttaataaggcatccttccgatgctgacttctcaccgtccgttttccaataggagcgggcggtatgtttt

SEQ ID NO: 935 - RNA, 110 nt, synthetic construct
  source 1..110: mol_type = other RNA
  modified_base 1..3: mod_base = OTHER; note = 2'O-Methyl ribonucleotide
  modified_base 1..3: mod_base = OTHER; note = Phosphorothioate linkage
  modified_base 108..110: mod_base = OTHER; note = 2'O-Methyl ribonucleotide
  modified_base 107..109: mod_base = OTHER; note = Phosphorothioate linkage
gcatcatcaccgtttttctggagttgagaatcgaaagattcttaataaggcatccttccgatgctgacttctcaccgtccgttttccaataggagcgggcggtatgtttt

SEQ ID NO: 936 - RNA, 110 nt, synthetic construct
  source 1..110: mol_type = other RNA
  modified_base 1..3: mod_base = OTHER; note = 2'O-Methyl ribonucleotide
  modified_base 1..3: mod_base = OTHER; note = Phosphorothioate linkage
  modified_base 108..110: mod_base = OTHER; note = 2'O-Methyl ribonucleotide
  modified_base 107..109: mod_base = OTHER; note = Phosphorothioate linkage
cgtttttctggacaaccccaaagttgagaatcgaaagattcttaataaggcatccttccgatgctgacttctcaccgtccgttttccaataggagcgggcggtatgtttt

SEQ ID NO: 937 - RNA, 110 nt, synthetic construct
  source 1..110: mol_type = other RNA
  modified_base 1..3: mod_base = OTHER; note = 2'O-Methyl ribonucleotide
  modified_base 1..3: mod_base = OTHER; note = Phosphorothioate linkage
  modified_base 108..110: mod_base = OTHER; note = 2'O-Methyl ribonucleotide
  modified_base 107..109: mod_base = OTHER; note = Phosphorothioate linkage
tggacaaccccaaagtaccccggttgagaatcgaaagattcttaataaggcatccttccgatgctgacttctcaccgtccgttttccaataggagcgggcggtatgtttt

SEQ ID NO: 938 - RNA, 110 nt, synthetic construct
  source 1..110: mol_type = other RNA
  modified_base 1..3: mod_base = OTHER; note = 2'O-Methyl ribonucleotide
  modified_base 1..3: mod_base = OTHER; note = Phosphorothioate linkage
  modified_base 108..110: mod_base = OTHER; note = 2'O-Methyl ribonucleotide
  modified_base 107..109: mod_base = OTHER; note = Phosphorothioate linkage
tcctcttgctttctttgcctgggttgagaatcgaaagattcttaataaggcatccttccgatgctgacttctcaccgtccgttttccaataggagcgggcggtatgtttt

SEQ ID NO: 939 - RNA, 110 nt, synthetic construct
  source 1..110: mol_type = other RNA
  modified_base 1..3: mod_base = OTHER; note = 2'O-Methyl ribonucleotide
  modified_base 1..3: mod_base = OTHER; note = Phosphorothioate linkage
  modified_base 108..110: mod_base = OTHER; note = 2'O-Methyl ribonucleotide
  modified_base 107..109: mod_base = OTHER; note = Phosphorothioate linkage
ctcactcctttcatttgggcaggttgagaatcgaaagattcttaataaggcatccttccgatgctgacttctcaccgtccgttttccaataggagcgggcggtatgtttt

SEQ ID NO: 940 - RNA, 110 nt, synthetic construct
  source 1..110: mol_type = other RNA
  modified_base 1..3: mod_base = OTHER; note = 2'O-Methyl ribonucleotide
  modified_base 1..3: mod_base = OTHER; note = Phosphorothioate linkage
  modified_base 108..110: mod_base = OTHER; note = 2'O-Methyl ribonucleotide
  modified_base 107..109: mod_base = OTHER; note = Phosphorothioate linkage
ctagtctgtgctagctcttccagttgagaatcgaaagattcttaataaggcatccttccgatgctgacttctcaccgtccgttttccaataggagcgggcggtatgtttt

SEQ ID NO: 941 - RNA, 110 nt, synthetic construct
  source 1..110: mol_type = other RNA
  modified_base 1..3: mod_base = OTHER; note = 2'O-Methyl ribonucleotide
  modified_base 1..3: mod_base = OTHER; note = Phosphorothioate linkage
  modified_base 108..110: mod_base = OTHER; note = 2'O-Methyl ribonucleotide
  modified_base 107..109: mod_base = OTHER; note = Phosphorothioate linkage
ctagtcttcttcctccaacccggttgagaatcgaaagattcttaataaggcatccttccgatgctgacttctcaccgtccgttttccaataggagcgggcggtatgtttt

SEQ ID NO: 942 - RNA, 110 nt, synthetic construct
  source 1..110: mol_type = other RNA
  modified_base 1..3: mod_base = OTHER; note = 2'O-Methyl ribonucleotide
  modified_base 1..3: mod_base = OTHER; note = Phosphorothioate linkage
  modified_base 108..110: mod_base = OTHER; note = 2'O-Methyl ribonucleotide
  modified_base 107..109: mod_base = OTHER; note = Phosphorothioate linkage
tttgctgcctccagggatcctggttgagaatcgaaagattcttaataaggcatccttccgatgctgacttctcaccgtccgttttccaataggagcgggcggtatgtttt

SEQ ID NO: 943 - RNA, 110 nt, synthetic construct
  source 1..110: mol_type = other RNA
  modified_base 1..3: mod_base = OTHER; note = 2'O-Methyl ribonucleotide
  modified_base 1..3: mod_base = OTHER; note = Phosphorothioate linkage
  modified_base 108..110: mod_base = OTHER; note = 2'O-Methyl ribonucleotide
  modified_base 107..109: mod_base = OTHER; note = Phosphorothioate linkage
tgggtacttttatctgtcccctgttgagaatcgaaagattcttaataaggcatccttccgatgctgacttctcaccgtccgttttccaataggagcgggcggtatgtttt

SEQ ID NO: 944 - RNA, 110 nt, synthetic construct
  source 1..110: mol_type = other RNA
  modified_base 1..3: mod_base = OTHER; note = 2'O-Methyl ribonucleotide
  modified_base 1..3: mod_base = OTHER; note = Phosphorothioate linkage
  modified_base 108..110: mod_base = OTHER; note = 2'O-Methyl ribonucleotide
  modified_base 107..109: mod_base = OTHER; note = Phosphorothioate linkage
agggacaggattggtgacagaagttgagaatcgaaagattcttaataaggcatccttccgatgctgacttctcaccgtccgttttccaataggagcgggcggtatgtttt

SEQ ID NO: 945 - RNA, 110 nt, synthetic construct
  source 1..110: mol_type = other RNA
  modified_base 1..3: mod_base = OTHER; note = 2'O-Methyl ribonucleotide
  modified_base 1..3: mod_base = OTHER; note = Phosphorothioate linkage
  modified_base 108..110: mod_base = OTHER; note = 2'O-Methyl ribonucleotide
  modified_base 107..109: mod_base = OTHER; note = Phosphorothioate linkage
ctagtctcctgatattgggtctgttgagaatcgaaagattcttaataaggcatccttccgatgctgacttctcaccgtccgttttccaataggagcgggcggtatgtttt

SEQ ID NO: 946 - RNA, 110 nt, synthetic construct
  source 1..110: mol_type = other RNA
  modified_base 1..3: mod_base = OTHER; note = 2'O-Methyl ribonucleotide
  modified_base 1..3: mod_base = OTHER; note = Phosphorothioate linkage
  modified_base 108..110: mod_base = OTHER; note = 2'O-Methyl ribonucleotide
  modified_base 107..109: mod_base = OTHER; note = Phosphorothioate linkage
gcagattccttatctggtgacagttgagaatcgaaagattcttaataaggcatccttccgatgctgacttctcaccgtccgttttccaataggagcgggcggtatgtttt

SEQ ID NO: 947 - RNA, 110 nt, synthetic construct
  source 1..110: mol_type = other RNA
  modified_base 1..3: mod_base = OTHER; note = 2'O-Methyl ribonucleotide
  modified_base 1..3: mod_base = OTHER; note = Phosphorothioate linkage
  modified_base 108..110: mod_base = OTHER; note = 2'O-Methyl ribonucleotide
  modified_base 107..109: mod_base = OTHER; note = Phosphorothioate linkage
tgacctgcccggttctcagtgggttgagaatcgaaagattcttaataaggcatccttccgatgctgacttctcaccgtccgttttccaataggagcgggcggtatgtttt

SEQ ID NO: 948 - RNA, 110 nt, synthetic construct
  source 1..110: mol_type = other RNA
  modified_base 1..3: mod_base = OTHER; note = 2'O-Methyl ribonucleotide
  modified_base 1..3: mod_base = OTHER; note = Phosphorothioate linkage
  modified_base 108..110: mod_base = OTHER; note = 2'O-Methyl ribonucleotide
  modified_base 107..109: mod_base = OTHER; note = Phosphorothioate linkage
aactttggctcttcacctttctgttgagaatcgaaagattcttaataaggcatccttccgatgctgacttctcaccgtccgttttccaataggagcgggcggtatgtttt

SEQ ID NO: 949 - RNA, 110 nt, synthetic construct
  source 1..110: mol_type = other RNA
  modified_base 1..3: mod_base = OTHER; note = 2'O-Methyl ribonucleotide
  modified_base 1..3: mod_base = OTHER; note = Phosphorothioate linkage
  modified_base 108..110: mod_base = OTHER; note = 2'O-Methyl ribonucleotide
  modified_base 107..109: mod_base = OTHER; note = Phosphorothioate linkage
cctgtgagataaggccagtagcgttgagaatcgaaagattcttaataaggcatccttccgatgctgacttctcaccgtccgttttccaataggagcgggcggtatgtttt

SEQ ID NO: 950 - DNA, 22 bp, Adeno-associated virus 1
  source 1..22: mol_type = genomic DNA
acgcatcccccccttccctccc

SEQ ID NO: 951 - DNA, 22 bp, Adeno-associated virus 1
  source 1..22: mol_type = genomic DNA
ggggcttttctgtcaccaatcc

SEQ ID NO: 952 - DNA, 22 bp, Adeno-associated virus 1
  source 1..22: mol_type = genomic DNA
ctgtcaccaatcctgtccctag

SEQ ID NO: 953 - DNA, 22 bp, Adeno-associated virus 1
  source 1..22: mol_type = genomic DNA
ccagaaccagagccacattaac

SEQ ID NO: 954 - DNA, 22 bp, Adeno-associated virus 1
  source 1..22: mol_type = genomic DNA
tggtcccagctcggggacacag

SEQ ID NO: 955 - DNA, 22 bp, Adeno-associated virus 1
  source 1..22: mol_type = genomic DNA
aagaagactagctgagctctcg

SEQ ID NO: 956 - DNA, 22 bp, Adeno-associated virus 1
  source 1..22: mol_type = genomic DNA
cctaagaaacgagagatggcac

SEQ ID NO: 957 - DNA, 22 bp, Adeno-associated virus 1
  source 1..22: mol_type = genomic DNA
gcatcatcaccgtttttctgga

SEQ ID NO: 958 - DNA, 22 bp, Adeno-associated virus 1
  source 1..22: mol_type = genomic DNA
cgtttttctggacaaccccaaa

SEQ ID NO: 959 - DNA, 22 bp, Adeno-associated virus 1
  source 1..22: mol_type = genomic DNA
tggacaaccccaaagtaccccg

SEQ ID NO: 960 - DNA, 22 bp, Adeno-associated virus 1
  source 1..22: mol_type = genomic DNA
tcctcttgctttctttgcctgg

SEQ ID NO: 961 - DNA, 22 bp, Adeno-associated virus 1
  source 1..22: mol_type = genomic DNA
ctcactcctttcatttgggcag

SEQ ID NO: 962 - DNA, 22 bp, Adeno-associated virus 1
  source 1..22: mol_type = genomic DNA
ctagtctgtgctagctcttcca

SEQ ID NO: 963 - DNA, 22 bp, Adeno-associated virus 1
  source 1..22: mol_type = genomic DNA
ctagtcttcttcctccaacccg

SEQ ID NO: 964 - DNA, 22 bp, Adeno-associated virus 1
  source 1..22: mol_type = genomic DNA
tttgctgcctccagggatcctg

SEQ ID NO: 965 - DNA, 22 bp, Adeno-associated virus 1
  source 1..22: mol_type = genomic DNA
tgggtacttttatctgtcccct

SEQ ID NO: 966 - DNA, 22 bp, Adeno-associated virus 1
  source 1..22: mol_type = genomic DNA
agggacaggattggtgacagaa

SEQ ID NO: 967 - DNA, 22 bp, Adeno-associated virus 1
  source 1..22: mol_type = genomic DNA
ctagtctcctgatattgggtct

SEQ ID NO: 968 - DNA, 22 bp, Adeno-associated virus 1
  source 1..22: mol_type = genomic DNA
gcagattccttatctggtgaca

SEQ ID NO: 969 - DNA, 22 bp, Adeno-associated virus 1
  source 1..22: mol_type = genomic DNA
tgacctgcccggttctcagtgg

SEQ ID NO: 970 - DNA, 22 bp, Adeno-associated virus 1
  source 1..22: mol_type = genomic DNA
aactttggctcttcacctttct

SEQ ID NO: 971 - DNA, 22 bp, Adeno-associated virus 1
  source 1..22: mol_type = genomic DNA
cctgtgagataaggccagtagc

SEQ ID NO: 972 - RNA, 110 nt, synthetic construct
  source 1..110: mol_type = other RNA
  modified_base 1..3: mod_base = OTHER; note = 2'O-Methyl ribonucleotide
  modified_base 1..3: mod_base = OTHER; note = Phosphorothioate linkage
  modified_base 108..110: mod_base = OTHER; note = 2'O-Methyl ribonucleotide
  modified_base 107..109: mod_base = OTHER; note = Phosphorothioate linkage
cgattttgattctcaaacaaatgttgagaatcgaaagattcttaataaggcatccttccgatgctgacttctcaccgtccgttttccaataggagcgggcggtatgtttt

SEQ ID NO: 973 - RNA, 110 nt, synthetic construct
  source 1..110: mol_type = other RNA
  modified_base 1..3: mod_base = OTHER; note = 2'O-Methyl ribonucleotide
  modified_base 1..3: mod_base = OTHER; note = Phosphorothioate linkage
  modified_base 108..110: mod_base = OTHER; note = 2'O-Methyl ribonucleotide
  modified_base 107..109: mod_base = OTHER; note = Phosphorothioate linkage
caaagtaaggattctgatgtgtgttgagaatcgaaagattcttaataaggcatccttccgatgctgacttctcaccgtccgttttccaataggagcgggcggtatgtttt

SEQ ID NO: 974 - RNA, 110 nt, synthetic construct
  source 1..110: mol_type = other RNA
  modified_base 1..3: mod_base = OTHER; note = 2'O-Methyl ribonucleotide
  modified_base 1..3: mod_base = OTHER; note = Phosphorothioate linkage
  modified_base 108..110: mod_base = OTHER; note = 2'O-Methyl ribonucleotide
  modified_base 107..109: mod_base = OTHER; note = Phosphorothioate linkage
tatatcacagacaaaactgtgcgttgagaatcgaaagattcttaataaggcatccttccgatgctgacttctcaccgtccgttttccaataggagcgggcggtatgtttt

SEQ ID NO: 975 - RNA, 110 nt, synthetic construct
  source 1..110: mol_type = other RNA
  modified_base 1..3: mod_base = OTHER; note = 2'O-Methyl ribonucleotide
  modified_base 1..3: mod_base = OTHER; note = Phosphorothioate linkage
  modified_base 108..110: mod_base = OTHER; note = 2'O-Methyl ribonucleotide
  modified_base 107..109: mod_base = OTHER; note = Phosphorothioate linkage
gcatgtgcaaacgccttcaacagttgagaatcgaaagattcttaataaggcatccttccgatgctgacttctcaccgtccgttttccaataggagcgggcggtatgtttt

SEQ ID NO: 976 - RNA, 110 nt, synthetic construct
  source 1..110: mol_type = other RNA
  modified_base 1..3: mod_base = OTHER; note = 2'O-Methyl ribonucleotide
  modified_base 1..3: mod_base = OTHER; note = Phosphorothioate linkage
  modified_base 108..110: mod_base = OTHER; note = 2'O-Methyl ribonucleotide
  modified_base 107..109: mod_base = OTHER; note = Phosphorothioate linkage
tgtgcaaacgccttcaacaacagttgagaatcgaaagattcttaataaggcatccttccgatgctgacttctcaccgtccgttttccaataggagcgggcggtatgtttt

SEQ ID NO: 977 - RNA, 110 nt, synthetic construct
  source 1..110: mol_type = other RNA
  modified_base 1..3: mod_base = OTHER; note = 2'O-Methyl ribonucleotide
  modified_base 1..3: mod_base = OTHER; note = Phosphorothioate linkage
  modified_base 108..110: mod_base = OTHER; note = 2'O-Methyl ribonucleotide
  modified_base 107..109: mod_base = OTHER; note = Phosphorothioate linkage
ttcaacaacagcattattccaggttgagaatcgaaagattcttaataaggcatccttccgatgctgacttctcaccgtccgttttccaataggagcgggcggtatgtttt

SEQ ID NO: 978 - RNA, 110 nt, synthetic construct
  source 1..110: mol_type = other RNA
  modified_base 1..3: mod_base = OTHER; note = 2'O-Methyl ribonucleotide
  modified_base 1..3: mod_base = OTHER; note = Phosphorothioate linkage
  modified_base 108..110: mod_base = OTHER; note = 2'O-Methyl ribonucleotide
  modified_base 107..109: mod_base = OTHER; note = Phosphorothioate linkage
gcaaagtcagatttgttgctccgttgagaatcgaaagattcttaataaggcatccttccgatgctgacttctcaccgtccgttttccaataggagcgggcggtatgtttt

SEQ ID NO: 979 - RNA, 110 nt, synthetic construct
  source 1..110: mol_type = other RNA
  modified_base 1..3: mod_base = OTHER; note = 2'O-Methyl ribonucleotide
  modified_base 1..3: mod_base = OTHER; note = Phosphorothioate linkage
  modified_base 108..110: mod_base = OTHER; note = 2'O-Methyl ribonucleotide
  modified_base 107..109: mod_base = OTHER; note = Phosphorothioate linkage
gtcagatttgttgctccaggccgttgagaatcgaaagattcttaataaggcatccttccgatgctgacttctcaccgtccgttttccaataggagcgggcggtatgtttt

SEQ ID NO: 980 - RNA, 110 nt, synthetic construct
  source 1..110: mol_type = other RNA
  modified_base 1..3: mod_base = OTHER; note = 2'O-Methyl ribonucleotide
  modified_base 1..3: mod_base = OTHER; note = Phosphorothioate linkage
  modified_base 108..110: mod_base = OTHER; note = 2'O-Methyl ribonucleotide
  modified_base 107..109: mod_base = OTHER; note = Phosphorothioate linkage
ttgaagtccatagacctcatgtgttgagaatcgaaagattcttaataaggcatccttccgatgctgacttctcaccgtccgttttccaataggagcgggcggtatgtttt

SEQ ID NO: 981 - RNA, 110 nt, synthetic construct
  source 1..110: mol_type = other RNA
  modified_base 1..3: mod_base = OTHER; note = 2'O-Methyl ribonucleotide
  modified_base 1..3: mod_base = OTHER; note = Phosphorothioate linkage
  modified_base 108..110: mod_base = OTHER; note = 2'O-Methyl ribonucleotide
  modified_base 107..109: mod_base = OTHER; note = Phosphorothioate linkage
catgtctagcacagttttgtctgttgagaatcgaaagattcttaataaggcatccttccgatgctgacttctcaccgtccgttttccaataggagcgggcggtatgtttt

SEQ ID NO: 982 - RNA, 110 nt, synthetic construct
  source 1..110: mol_type = other RNA
  modified_base 1..3: mod_base = OTHER; note = 2'O-Methyl ribonucleotide
  modified_base 1..3: mod_base = OTHER; note = Phosphorothioate linkage
  modified_base 108..110: mod_base = OTHER; note = 2'O-Methyl ribonucleotide
  modified_base 107..109: mod_base = OTHER; note = Phosphorothioate linkage
tacacatcagaatccttactttgttgagaatcgaaagattcttaataaggcatccttccgatgctgacttctcaccgtccgttttccaataggagcgggcggtatgtttt

SEQ ID NO: 983 - RNA, 110 nt, synthetic construct
  source 1..110: mol_type = other RNA
  modified_base 1..3: mod_base = OTHER; note = 2'O-Methyl ribonucleotide
  modified_base 1..3: mod_base = OTHER; note = Phosphorothioate linkage
  modified_base 108..110: mod_base = OTHER; note = 2'O-Methyl ribonucleotide
  modified_base 107..109: mod_base = OTHER; note = Phosphorothioate linkage
atcggtgaataggcagacagacgttgagaatcgaaagattcttaataaggcatccttccgatgctgacttctcaccgtccgttttccaataggagcgggcggtatgtttt

SEQ ID NO: 984 - RNA, 110 nt, synthetic construct
  source 1..110: mol_type = other RNA
  modified_base 1..3: mod_base = OTHER; note = 2'O-Methyl ribonucleotide
  modified_base 1..3: mod_base = OTHER; note = Phosphorothioate linkage
  modified_base 108..110: mod_base = OTHER; note = 2'O-Methyl ribonucleotide
  modified_base 107..109: mod_base = OTHER; note = Phosphorothioate linkage
cactggatttagagtctctcaggttgagaatcgaaagattcttaataaggcatccttccgatgctgacttctcaccgtccgttttccaataggagcgggcggtatgtttt

SEQ ID NO: 985 - RNA, 110 nt, synthetic construct
  source 1..110: mol_type = other RNA
  modified_base 1..3: mod_base = OTHER; note = 2'O-Methyl ribonucleotide
  modified_base 1..3: mod_base = OTHER; note = Phosphorothioate linkage
  modified_base 108..110: mod_base = OTHER; note = 2'O-Methyl ribonucleotide
  modified_base 107..109: mod_base = OTHER; note = Phosphorothioate linkage
gtacacggcagggtcagggttcgttgagaatcgaaagattcttaataaggcatccttccgatgctgacttctcaccgtccgttttccaataggagcgggcggtatgtttt

SEQ ID NO: 986 - RNA, 110 nt, synthetic construct
  source 1..110: mol_type = other RNA
  modified_base 1..3: mod_base = OTHER; note = 2'O-Methyl ribonucleotide
  modified_base 1..3: mod_base = OTHER; note = Phosphorothioate linkage
  modified_base 108..110: mod_base = OTHER; note = 2'O-Methyl ribonucleotide
  modified_base 107..109: mod_base = OTHER; note = Phosphorothioate linkage
ttcaaagcttttctcgaccagcgttgagaatcgaaagattcttaataaggcatccttccgatgctgacttctcaccgtccgttttccaataggagcgggcggtatgtttt

SEQ ID NO: 987 - RNA, 110 nt, synthetic construct
  source 1..110: mol_type = other RNA
  modified_base 1..3: mod_base = OTHER; note = 2'O-Methyl ribonucleotide
  modified_base 1..3: mod_base = OTHER; note = Phosphorothioate linkage
  modified_base 108..110: mod_base = OTHER; note = 2'O-Methyl ribonucleotide
  modified_base 107..109: mod_base = OTHER; note = Phosphorothioate linkage
aaagcttttctcgaccagcttggttgagaatcgaaagattcttaataaggcatccttccgatgctgacttctcaccgtccgttttccaataggagcgggcggtatgtttt

SEQ ID NO: 988 - RNA, 110 nt, synthetic construct
  source 1..110: mol_type = other RNA
  modified_base 1..3: mod_base = OTHER; note = 2'O-Methyl ribonucleotide
  modified_base 1..3: mod_base = OTHER; note = Phosphorothioate linkage
  modified_base 108..110: mod_base = OTHER; note = 2'O-Methyl ribonucleotide
  modified_base 107..109: mod_base = OTHER; note = Phosphorothioate linkage
ttcaaggcccctcacctcagctgttgagaatcgaaagattcttaataaggcatccttccgatgctgacttctcaccgtccgttttccaataggagcgggcggtatgtttt

SEQ ID NO: 989 - RNA, 110 nt, synthetic construct
  source 1..110: mol_type = other RNA
  modified_base 1..3: mod_base = OTHER; note = 2'O-Methyl ribonucleotide
  modified_base 1..3: mod_base = OTHER; note = Phosphorothioate linkage
  modified_base 108..110: mod_base = OTHER; note = 2'O-Methyl ribonucleotide
  modified_base 107..109: mod_base = OTHER; note = Phosphorothioate linkage
cctcagctggaccacagccgcagttgagaatcgaaagattcttaataaggcatccttccgatgctgacttctcaccgtccgttttccaataggagcgggcggtatgtttt

SEQ ID NO: 990 - RNA, 110 nt, synthetic construct
  source 1..110: mol_type = other RNA
  modified_base 1..3: mod_base = OTHER; note = 2'O-Methyl ribonucleotide
  modified_base 1..3: mod_base = OTHER; note = Phosphorothioate linkage
  modified_base 108..110: mod_base = OTHER; note = 2'O-Methyl ribonucleotide
  modified_base 107..109: mod_base = OTHER; note = Phosphorothioate linkage
agcgtcatgagcagattaaaccgttgagaatcgaaagattcttaataaggcatccttccgatgctgacttctcaccgtccgttttccaataggagcgggcggtatgtttt

SEQ ID NO: 991 - RNA, 110 nt, synthetic construct
  source 1..110: mol_type = other RNA
  modified_base 1..3: mod_base = OTHER; note = 2'O-Methyl ribonucleotide
  modified_base 1..3: mod_base = OTHER; note = Phosphorothioate linkage
  modified_base 108..110: mod_base = OTHER; note = 2'O-Methyl ribonucleotide
  modified_base 107..109: mod_base = OTHER; note = Phosphorothioate linkage
ttcaggaggaggattcggaaccgttgagaatcgaaagattcttaataaggcatccttccgatgctgacttctcaccgtccgttttccaataggagcgggcggtatgtttt

SEQ ID NO: 992 - DNA, 22 bp, Homo sapiens
  source 1..22: mol_type = genomic DNA
cgattttgattctcaaacaaat

SEQ ID NO: 993 - DNA, 22 bp, Homo sapiens
  source 1..22: mol_type = genomic DNA
caaagtaaggattctgatgtgt

SEQ ID NO: 994 - DNA, 22 bp, Homo sapiens
  source 1..22: mol_type = genomic DNA
tatatcacagacaaaactgtgc

SEQ ID NO: 995 - DNA, 22 bp, Homo sapiens
  source 1..22: mol_type = genomic DNA
gcatgtgcaaacgccttcaaca

SEQ ID NO: 996 - DNA, 22 bp, Homo sapiens
  source 1..22: mol_type = genomic DNA
tgtgcaaacgccttcaacaaca

SEQ ID NO: 997 - DNA, 22 bp, Homo sapiens
  source 1..22: mol_type = genomic DNA
ttcaacaacagcattattccag

SEQ ID NO: 998 - DNA, 22 bp, Homo sapiens
  source 1..22: mol_type = genomic DNA
gcaaagtcagatttgttgctcc

SEQ ID NO: 999 - DNA, 22 bp, Homo sapiens
  source 1..22: mol_type = genomic DNA
gtcagatttgttgctccaggcc

SEQ ID NO: 1000 - DNA, 22 bp, Homo sapiens
  source 1..22: mol_type = genomic DNA
ttgaagtccatagacctcatgt

SEQ ID NO: 1001 - DNA, 22 bp, Homo sapiens
  source 1..22: mol_type = genomic DNA
catgtctagcacagttttgtct

SEQ ID NO: 1002 - DNA, 22 bp, Homo sapiens
  source 1..22: mol_type = genomic DNA
tacacatcagaatccttacttt

SEQ ID NO: 1003 - DNA, 22 bp, Homo sapiens
  source 1..22: mol_type = genomic DNA
atcggtgaataggcagacagac

SEQ ID NO: 1004 - DNA, 22 bp, Homo sapiens
  source 1..22: mol_type = genomic DNA
cactggatttagagtctctcag

SEQ ID NO: 1005 - DNA, 22 bp, Homo sapiens
  source 1..22: mol_type = genomic DNA
gtacacggcagggtcagggttc

SEQ ID NO: 1006 - DNA, 22 bp, Homo sapiens
  source 1..22: mol_type = genomic DNA
ttcaaagcttttctcgaccagc

SEQ ID NO: 1007 - DNA, 22 bp, Homo sapiens
  source 1..22: mol_type = genomic DNA
aaagcttttctcgaccagcttg

SEQ ID NO: 1008 - DNA, 22 bp, Homo sapiens
  source 1..22: mol_type = genomic DNA
ttcaaggcccctcacctcagct

SEQ ID NO: 1009 - DNA, 22 bp, Homo sapiens
  source 1..22: mol_type = genomic DNA
cctcagctggaccacagccgca

SEQ ID NO: 1010 - DNA, 22 bp, Homo sapiens
  source 1..22: mol_type = genomic DNA
agcgtcatgagcagattaaacc

SEQ ID NO: 1011 - DNA, 22 bp, Homo sapiens
  source 1..22: mol_type = genomic DNA
ttcaggaggaggattcggaacc

SEQ ID NO: 1012 - RNA, 110 nt, synthetic construct
  source 1..110: mol_type = other RNA
  modified_base 1..3: mod_base = OTHER; note = 2'O-Methyl ribonucleotide
  modified_base 1..3: mod_base = OTHER; note = Phosphorothioate linkage
  modified_base 108..110: mod_base = OTHER; note = 2'O-Methyl ribonucleotide
  modified_base 107..109: mod_base = OTHER; note = Phosphorothioate linkage
cacagccctgccaggacggggcgttgagaatcgaaagattcttaataaggcatccttccgatgctgacttctcaccgtccgttttccaataggagcgggcggtatgtttt

SEQ ID NO: 1013 - RNA, 110 nt, synthetic construct
  source 1..110: mol_type = other RNA
  modified_base 1..3: mod_base = OTHER; note = 2'O-Methyl ribonucleotide
  modified_base 1..3: mod_base = OTHER; note = Phosphorothioate linkage
  modified_base 108..110: mod_base = OTHER; note = 2'O-Methyl ribonucleotide
  modified_base 107..109: mod_base = OTHER; note = Phosphorothioate linkage
ggtaaaactgacgcacggaggagttgagaatcgaaagattcttaataaggcatccttccgatgctgacttctcaccgtccgttttccaataggagcgggcggtatgtttt

SEQ ID NO: 1014 - RNA, 110 nt, synthetic construct
  source 1..110: mol_type = other RNA
  modified_base 1..3: mod_base = OTHER; note = 2'O-Methyl ribonucleotide
  modified_base 1..3: mod_base = OTHER; note = Phosphorothioate linkage
  modified_base 108..110: mod_base = OTHER; note = 2'O-Methyl ribonucleotide
  modified_base 107..109: mod_base = OTHER; note = Phosphorothioate linkage
tcttgggaagtgtaaggaagctgttgagaatcgaaagattcttaataaggcatccttccgatgctgacttctcaccgtccgttttccaataggagcgggcggtatgtttt

SEQ ID NO: 1015 - RNA, 110 nt, synthetic construct
  source 1..110: mol_type = other RNA
  modified_base 1..3: mod_base = OTHER; note = 2'O-Methyl ribonucleotide
  modified_base 1..3: mod_base = OTHER; note = Phosphorothioate linkage
  modified_base 108..110: mod_base = OTHER; note = 2'O-Methyl ribonucleotide
  modified_base 107..109: mod_base = OTHER; note = Phosphorothioate linkage
tctgggagagggtagcgcaggggttgagaatcgaaagattcttaataaggcatccttccgatgctgacttctcaccgtccgttttccaataggagcgggcggtatgtttt

SEQ ID NO: 1016 - RNA, 110 nt, synthetic construct
  source 1..110: mol_type = other RNA
  modified_base 1..3: mod_base = OTHER; note = 2'O-Methyl ribonucleotide
  modified_base 1..3: mod_base = OTHER; note = Phosphorothioate linkage
  modified_base 108..110: mod_base = OTHER; note = 2'O-Methyl ribonucleotide
  modified_base 107..109: mod_base = OTHER; note = Phosphorothioate linkage
gggtggccactgagaaccgggcgttgagaatcgaaagattcttaataaggcatccttccgatgctgacttctcaccgtccgttttccaataggagcgggcggtatgtttt

SEQ ID NO: 1017 - RNA, 110 nt, synthetic construct
  source 1..110: mol_type = other RNA
  modified_base 1..3: mod_base = OTHER; note = 2'O-Methyl ribonucleotide
  modified_base 1..3: mod_base = OTHER; note = Phosphorothioate linkage
  modified_base 108..110: mod_base = OTHER; note = 2'O-Methyl ribonucleotide
  modified_base 107..109: mod_base = OTHER; note = Phosphorothioate linkage
gatggctccaggaaatgggggtgttgagaatcgaaagattcttaataaggcatccttccgatgctgacttctcaccgtccgttttccaataggagcgggcggtatgtttt

SEQ ID NO: 1018 - RNA, 110 nt, synthetic construct
  source 1..110: mol_type = other RNA
  modified_base 1..3: mod_base = OTHER; note = 2'O-Methyl ribonucleotide
  modified_base 1..3: mod_base = OTHER; note = Phosphorothioate linkage
  modified_base 108..110: mod_base = OTHER; note = 2'O-Methyl ribonucleotide
  modified_base 107..109: mod_base = OTHER; note = Phosphorothioate linkage
taacaggaggtgggggttagacgttgagaatcgaaagattcttaataaggcatccttccgatgctgacttctcaccgtccgttttccaataggagcgggcggtatgtttt

SEQ ID NO: 1019 - RNA, 110 nt, synthetic construct
  source 1..110: mol_type = other RNA
  modified_base 1..3: mod_base = OTHER; note = 2'O-Methyl ribonucleotide
  modified_base 1..3: mod_base = OTHER; note = Phosphorothioate linkage
  modified_base 108..110: mod_base = OTHER; note = 2'O-Methyl ribonucleotide
  modified_base 107..109: mod_base = OTHER; note = Phosphorothioate linkage
gaggcctaaggatggggcttttgttgagaatcgaaagattcttaataaggcatccttccgatgctgacttctcaccgtccgttttccaataggagcgggcggtatgtttt

SEQ ID NO: 1020 - RNA, 110 nt, synthetic construct
  source 1..110: mol_type = other RNA
  modified_base 1..3: mod_base = OTHER; note = 2'O-Methyl ribonucleotide
  modified_base 1..3: mod_base = OTHER; note = Phosphorothioate linkage
  modified_base 108..110: mod_base = OTHER; note = 2'O-Methyl ribonucleotide
  modified_base 107..109: mod_base = OTHER; note = Phosphorothioate linkage
tgtggggtggaggggacagatagttgagaatcgaaagattcttaataaggcatccttccgatgctgacttctcaccgtccgttttccaataggagcgggcggtatgtttt

SEQ ID NO: 1021 - RNA, 110 nt, synthetic construct
  source 1..110: mol_type = other RNA
  modified_base 1..3: mod_base = OTHER; note = 2'O-Methyl ribonucleotide
  modified_base 1..3: mod_base = OTHER; note = Phosphorothioate linkage
  modified_base 108..110: mod_base = OTHER; note = 2'O-Methyl ribonucleotide
  modified_base 107..109: mod_base = OTHER; note = Phosphorothioate linkage
cagataaaagtacccagaaccagttgagaatcgaaagattcttaataaggcatccttccgatgctgacttctcaccgtccgttttccaataggagcgggcggtatgtttt

SEQ ID NO: 1022 - RNA, 110 nt, synthetic construct
  source 1..110: mol_type = other RNA
  modified_base 1..3: mod_base = OTHER; note = 2'O-Methyl ribonucleotide
  modified_base 1..3: mod_base = OTHER; note = Phosphorothioate linkage
  modified_base 108..110: mod_base = OTHER; note = 2'O-Methyl ribonucleotide
  modified_base 107..109: mod_base = OTHER; note = Phosphorothioate linkage
agagccacattaaccggccctggttgagaatcgaaagattcttaataaggcatccttccgatgctgacttctcaccgtccgttttccaataggagcgggcggtatgtttt

SEQ ID NO: 1023 - RNA, 110 nt, synthetic construct
  source 1..110: mol_type = other RNA
  modified_base 1..3: mod_base = OTHER; note = 2'O-Methyl ribonucleotide
  modified_base 1..3: mod_base = OTHER; note = Phosphorothioate linkage
  modified_base 108..110: mod_base = OTHER; note = 2'O-Methyl ribonucleotide
  modified_base 107..109: mod_base = OTHER; note = Phosphorothioate linkage
aatataaggtggtcccagctcggttgagaatcgaaagattcttaataaggcatccttccgatgctgacttctcaccgtccgttttccaataggagcgggcggtatgtttt

SEQ ID NO: 1024 - RNA, 110 nt, synthetic construct
  source 1..110: mol_type = other RNA
  modified_base 1..3: mod_base = OTHER; note = 2'O-Methyl ribonucleotide
  modified_base 1..3: mod_base = OTHER; note = Phosphorothioate linkage
  modified_base 108..110: mod_base = OTHER; note = 2'O-Methyl ribonucleotide
  modified_base 107..109: mod_base = OTHER; note = Phosphorothioate linkage
gacacaggatccctggaggcaggttgagaatcgaaagattcttaataaggcatccttccgatgctgacttctcaccgtccgttttccaataggagcgggcggtatgtttt

SEQ ID NO: 1025 - RNA, 110 nt, synthetic construct
  source 1..110: mol_type = other RNA
  modified_base 1..3: mod_base = OTHER; note = 2'O-Methyl ribonucleotide
  modified_base 1..3: mod_base = OTHER; note = Phosphorothioate linkage
  modified_base 108..110: mod_base = OTHER; note = 2'O-Methyl ribonucleotide
  modified_base 107..109: mod_base = OTHER; note = Phosphorothioate linkage
cagcaaacatgctgtcctgaaggttgagaatcgaaagattcttaataaggcatccttccgatgctgacttctcaccgtccgttttccaataggagcgggcggtatgtttt

SEQ ID NO: 1026 - RNA, 110 nt, synthetic construct
  source 1..110: mol_type = other RNA
  modified_base 1..3: mod_base = OTHER; note = 2'O-Methyl ribonucleotide
  modified_base 1..3: mod_base = OTHER; note = Phosphorothioate linkage
  modified_base 108..110: mod_base = OTHER; note = 2'O-Methyl ribonucleotide
  modified_base 107..109: mod_base = OTHER; note = Phosphorothioate linkage
tgagctctcggacccctggaaggttgagaatcgaaagattcttaataaggcatccttccgatgctgacttctcaccgtccgttttccaataggagcgggcggtatgtttt

SEQ ID NO: 1027 - RNA, 110 nt, synthetic construct
  source 1..110: mol_type = other RNA
  modified_base 1..3: mod_base = OTHER; note = 2'O-Methyl ribonucleotide
  modified_base 1..3: mod_base = OTHER; note = Phosphorothioate linkage
  modified_base 108..110: mod_base = OTHER; note = 2'O-Methyl ribonucleotide
  modified_base 107..109: mod_base = OTHER; note = Phosphorothioate linkage
ccatgacagggggctggaagaggttgagaatcgaaagattcttaataaggcatccttccgatgctgacttctcaccgtccgttttccaataggagcgggcggtatgtttt

SEQ ID NO: 1028 - RNA, 110 nt, synthetic construct
  source 1..110: mol_type = other RNA
  modified_base 1..3: mod_base = OTHER; note = 2'O-Methyl ribonucleotide
  modified_base 1..3: mod_base = OTHER; note = Phosphorothioate linkage
  modified_base 108..110: mod_base = OTHER; note = 2'O-Methyl ribonucleotide
  modified_base 107..109: mod_base = OTHER; note = Phosphorothioate linkage
aggtggctaaagccagggagacgttgagaatcgaaagattcttaataaggcatccttccgatgctgacttctcaccgtccgttttccaataggagcgggcggtatgtttt

SEQ ID NO: 1029 - RNA, 110 nt, synthetic construct
  source 1..110: mol_type = other RNA
  modified_base 1..3: mod_base = OTHER; note = 2'O-Methyl ribonucleotide
  modified_base 1..3: mod_base = OTHER; note = Phosphorothioate linkage
  modified_base 108..110: mod_base = OTHER; note = 2'O-Methyl ribonucleotide
  modified_base 107..109: mod_base = OTHER; note = Phosphorothioate linkage
gaaggggaggcgggacgcaagggttgagaatcgaaagattcttaataaggcatccttccgatgctgacttctcaccgtccgttttccaataggagcgggcggtatgtttt

SEQ ID NO: 1030 - RNA, 110 nt, synthetic construct
  source 1..110: mol_type = other RNA
  modified_base 1..3: mod_base = OTHER; note = 2'O-Methyl ribonucleotide
  modified_base 1..3: mod_base = OTHER; note = Phosphorothioate linkage
  modified_base 108..110: mod_base = OTHER; note = 2'O-Methyl ribonucleotide
  modified_base 107..109: mod_base = OTHER; note = Phosphorothioate linkage
caagggagacatccgtcggagagttgagaatcgaaagattcttaataaggcatccttccgatgctgacttctcaccgtccgttttccaataggagcgggcggtatgtttt

SEQ ID NO: 1031 - RNA, 110 nt, synthetic construct
  source 1..110: mol_type = other RNA
  modified_base 1..3: mod_base = OTHER; note = 2'O-Methyl ribonucleotide
  modified_base 1..3: mod_base = OTHER; note = Phosphorothioate linkage
  modified_base 108..110: mod_base = OTHER; note = 2'O-Methyl ribonucleotide
  modified_base 107..109: mod_base = OTHER; note = Phosphorothioate linkage
aggccatcctaagaaacgagaggttgagaatcgaaagattcttaataaggcatccttccgatgctgacttctcaccgtccgttttccaataggagcgggcggtatgtttt

SEQ ID NO: 1032 - RNA, 110 nt, synthetic construct
  source 1..110: mol_type = other RNA
  modified_base 1..3: mod_base = OTHER; note = 2'O-Methyl ribonucleotide
  modified_base 1..3: mod_base = OTHER; note = Phosphorothioate linkage
  modified_base 108..110: mod_base = OTHER; note = 2'O-Methyl ribonucleotide
  modified_base 107..109: mod_base = OTHER; note = Phosphorothioate linkage
tttccttctccttctggggcctgttgagaatcgaaagattcttaataaggcatccttccgatgctgacttctcaccgtccgttttccaataggagcgggcggtatgtttt

SEQ ID NO: 1033 - RNA, 110 nt, synthetic construct
  source 1..110: mol_type = other RNA
  modified_base 1..3: mod_base = OTHER; note = 2'O-Methyl ribonucleotide
  modified_base 1..3: mod_base = OTHER; note = Phosphorothioate linkage
  modified_base 108..110: mod_base = OTHER; note = 2'O-Methyl ribonucleotide
  modified_base 107..109: mod_base = OTHER; note = Phosphorothioate linkage
cgcctccccttcttgtaggcctgttgagaatcgaaagattcttaataaggcatccttccgatgctgacttctcaccgtccgttttccaataggagcgggcggtatgtttt

SEQ ID NO: 1034 - RNA, 110 nt, synthetic construct
  source 1..110: mol_type = other RNA
  modified_base 1..3: mod_base = OTHER; note = 2'O-Methyl ribonucleotide
  modified_base 1..3: mod_base = OTHER; note = Phosphorothioate linkage
  modified_base 108..110: mod_base = OTHER; note = 2'O-Methyl ribonucleotide
  modified_base 107..109: mod_base = OTHER; note = Phosphorothioate linkage
ctccccttcttgtaggcctgcagttgagaatcgaaagattcttaataaggcatccttccgatgctgacttctcaccgtccgttttccaataggagcgggcggtatgtttt

SEQ ID NO: 1035 - RNA, 110 nt, synthetic construct
  source 1..110: mol_type = other RNA
  modified_base 1..3: mod_base = OTHER; note = 2'O-Methyl ribonucleotide
  modified_base 1..3: mod_base = OTHER; note = Phosphorothioate linkage
  modified_base 108..110: mod_base = OTHER; note = 2'O-Methyl ribonucleotide
  modified_base 107..109: mod_base = OTHER; note = Phosphorothioate linkage
caccgtttttctggacaaccccgttgagaatcgaaagattcttaataaggcatccttccgatgctgacttctcaccgtccgttttccaataggagcgggcggtatgtttt

SEQ ID NO: 1036 - RNA, 110 nt, synthetic construct
  source 1..110: mol_type = other RNA
  modified_base 1..3: mod_base = OTHER; note = 2'O-Methyl ribonucleotide
  modified_base 1..3: mod_base = OTHER; note = Phosphorothioate linkage
  modified_base 108..110: mod_base = OTHER; note = 2'O-Methyl ribonucleotide
  modified_base 107..109: mod_base = OTHER; note = Phosphorothioate linkage
aagtaccccgtctccctggcttgttgagaatcgaaagattcttaataaggcatccttccgatgctgacttctcaccgtccgttttccaataggagcgggcggtatgtttt

SEQ ID NO: 1037 - RNA, 110 nt, synthetic construct
  source 1..110: mol_type = other RNA
  modified_base 1..3: mod_base = OTHER; note = 2'O-Methyl ribonucleotide
  modified_base 1..3: mod_base = OTHER; note = Phosphorothioate linkage
  modified_base 108..110: mod_base = OTHER; note = 2'O-Methyl ribonucleotide
  modified_base 107..109: mod_base = OTHER; note = Phosphorothioate linkage
ccatcctcttgctttctttgccgttgagaatcgaaagattcttaataaggcatccttccgatgctgacttctcaccgtccgttttccaataggagcgggcggtatgtttt

SEQ ID NO: 1038 - RNA, 110 nt, synthetic construct
  source 1..110: mol_type = other RNA
  modified_base 1..3: mod_base = OTHER; note = 2'O-Methyl ribonucleotide
  modified_base 1..3: mod_base = OTHER; note = Phosphorothioate linkage
  modified_base 108..110: mod_base = OTHER; note = 2'O-Methyl ribonucleotide
  modified_base 107..109: mod_base = OTHER; note = Phosphorothioate linkage
caccccgttctcctgtggattcgttgagaatcgaaagattcttaataaggcatccttccgatgctgacttctcaccgtccgttttccaataggagcgggcggtatgtttt

SEQ ID NO: 1039 - RNA, 110 nt, synthetic construct
  source 1..110: mol_type = other RNA
  modified_base 1..3: mod_base = OTHER; note = 2'O-Methyl ribonucleotide
  modified_base 1..3: mod_base = OTHER; note = Phosphorothioate linkage
  modified_base 108..110: mod_base = OTHER; note = 2'O-Methyl ribonucleotide
  modified_base 107..109: mod_base = OTHER; note = Phosphorothioate linkage
ctgtgctagctcttccagccccgttgagaatcgaaagattcttaataaggcatccttccgatgctgacttctcaccgtccgttttccaataggagcgggcggtatgtttt

SEQ ID NO: 1040 - RNA, 110 nt, synthetic construct
  source 1..110: mol_type = other RNA
  modified_base 1..3: mod_base = OTHER; note = 2'O-Methyl ribonucleotide
  modified_base 1..3: mod_base = OTHER; note = Phosphorothioate linkage
  modified_base 108..110: mod_base = OTHER; note = 2'O-Methyl ribonucleotide
  modified_base 107..109: mod_base = OTHER; note = Phosphorothioate linkage
ctagctcttccagccccctgtcgttgagaatcgaaagattcttaataaggcatccttccgatgctgacttctcaccgtccgttttccaataggagcgggcggtatgtttt

SEQ ID NO: 1041 - RNA, 110 nt, synthetic construct
  source 1..110: mol_type = other RNA
  modified_base 1..3: mod_base = OTHER; note = 2'O-Methyl ribonucleotide
  modified_base 1..3: mod_base = OTHER; note = Phosphorothioate linkage
  modified_base 108..110: mod_base = OTHER; note = 2'O-Methyl ribonucleotide
  modified_base 107..109: mod_base = OTHER; note = Phosphorothioate linkage
gggcccctatgtccacttcagggttgagaatcgaaagattcttaataaggcatccttccgatgctgacttctcaccgtccgttttccaataggagcgggcggtatgtttt

SEQ ID NO: 1042 - RNA, 110 nt, synthetic construct
  source 1..110: mol_type = other RNA
  modified_base 1..3: mod_base = OTHER; note = 2'O-Methyl ribonucleotide
  modified_base 1..3: mod_base = OTHER; note = Phosphorothioate linkage
  modified_base 108..110: mod_base = OTHER; note = 2'O-Methyl ribonucleotide
  modified_base 107..109: mod_base = OTHER; note = Phosphorothioate linkage
gggatcctgtgtccccgagctggttgagaatcgaaagattcttaataaggcatccttccgatgctgacttctcaccgtccgttttccaataggagcgggcggtatgtttt

SEQ ID NO: 1043 - RNA, 110 nt, synthetic construct
  source 1..110: mol_type = other RNA
  modified_base 1..3: mod_base = OTHER; note = 2'O-Methyl ribonucleotide
  modified_base 1..3: mod_base = OTHER; note = Phosphorothioate linkage
  modified_base 108..110: mod_base = OTHER; note = 2'O-Methyl ribonucleotide
  modified_base 107..109: mod_base = OTHER; note = Phosphorothioate linkage
ccggttaatgtggctctggttcgttgagaatcgaaagattcttaataaggcatccttccgatgctgacttctcaccgtccgttttccaataggagcgggcggtatgtttt

SEQ ID NO: 1044 - RNA, 110 nt, synthetic construct
  source 1..110: mol_type = other RNA
  modified_base 1..3: mod_base = OTHER; note = 2'O-Methyl ribonucleotide
  modified_base 1..3: mod_base = OTHER; note = Phosphorothioate linkage
  modified_base 108..110: mod_base = OTHER; note = 2'O-Methyl ribonucleotide
  modified_base 107..109: mod_base = OTHER; note = Phosphorothioate linkage
ctgtcccctccaccccacagtggttgagaatcgaaagattcttaataaggcatccttccgatgctgacttctcaccgtccgttttccaataggagcgggcggtatgtttt

SEQ ID NO: 1045 - RNA, 110 nt, synthetic construct
  source 1..110: mol_type = other RNA
  modified_base 1..3: mod_base = OTHER; note = 2'O-Methyl ribonucleotide
  modified_base 1..3: mod_base = OTHER; note = Phosphorothioate linkage
  modified_base 108..110: mod_base = OTHER; note = 2'O-Methyl ribonucleotide
  modified_base 107..109: mod_base = OTHER; note = Phosphorothioate linkage
aggcctcctccttcctagtctcgttgagaatcgaaagattcttaataaggcatccttccgatgctgacttctcaccgtccgttttccaataggagcgggcggtatgtttt

SEQ ID NO: 1046 - RNA, 110 nt, synthetic construct
  source 1..110: mol_type = other RNA
  modified_base 1..3: mod_base = OTHER; note = 2'O-Methyl ribonucleotide
  modified_base 1..3: mod_base = OTHER; note = Phosphorothioate linkage
  modified_base 108..110: mod_base = OTHER; note = 2'O-Methyl ribonucleotide
  modified_base 107..109: mod_base = OTHER; note = Phosphorothioate linkage
tgttaggcagattccttatctggttgagaatcgaaagattcttaataaggcatccttccgatgctgacttctcaccgtccgttttccaataggagcgggcggtatgtttt

SEQ ID NO: 1047 - RNA, 110 nt, synthetic construct
  source 1..110: mol_type = other RNA
  modified_base 1..3: mod_base = OTHER; note = 2'O-Methyl ribonucleotide
  modified_base 1..3: mod_base = OTHER; note = Phosphorothioate linkage
  modified_base 108..110: mod_base = OTHER; note = 2'O-Methyl ribonucleotide
  modified_base 107..109: mod_base = OTHER; note = Phosphorothioate linkage
ggtgacacacccccatttcctggttgagaatcgaaagattcttaataaggcatccttccgatgctgacttctcaccgtccgttttccaataggagcgggcggtatgtttt

SEQ ID NO: 1048 - RNA, 110 nt, synthetic construct
  source 1..110: mol_type = other RNA
  modified_base 1..3: mod_base = OTHER; note = 2'O-Methyl ribonucleotide
  modified_base 1..3: mod_base = OTHER; note = Phosphorothioate linkage
  modified_base 108..110: mod_base = OTHER; note = 2'O-Methyl ribonucleotide
  modified_base 107..109: mod_base = OTHER; note = Phosphorothioate linkage
gcgtgacctgcccggttctcaggttgagaatcgaaagattcttaataaggcatccttccgatgctgacttctcaccgtccgttttccaataggagcgggcggtatgtttt

SEQ ID NO: 1049 - RNA, 110 nt, synthetic construct
  source 1..110: mol_type = other RNA
  modified_base 1..3: mod_base = OTHER; note = 2'O-Methyl ribonucleotide
  modified_base 1..3: mod_base = OTHER; note = Phosphorothioate linkage
  modified_base 108..110: mod_base = OTHER; note = 2'O-Methyl ribonucleotide
  modified_base 107..109: mod_base = OTHER; note = Phosphorothioate linkage
cccggttctcagtggccaccctgttgagaatcgaaagattcttaataaggcatccttccgatgctgacttctcaccgtccgttttccaataggagcgggcggtatgtttt

SEQ ID NO: 1050 - DNA, 22 bp, Adeno-associated virus 1
  source 1..22: mol_type = genomic DNA
cacagccctgccaggacggggc

SEQ ID NO: 1051 - DNA, 22 bp, Adeno-associated virus 1
  source 1..22: mol_type = genomic DNA
ggtaaaactgacgcacggagga

SEQ ID NO: 1052 - DNA, 22 bp, Adeno-associated virus 1
  source 1..22: mol_type = genomic DNA
tcttgggaagtgtaaggaagct

SEQ ID NO: 1053 - DNA, 22 bp, Adeno-associated virus 1
  source 1..22: mol_type = genomic DNA
tctgggagagggtagcgcaggg

SEQ ID NO: 1054 - DNA, 22 bp, Adeno-associated virus 1
  source 1..22: mol_type = genomic DNA
gggtggccactgagaaccgggc

SEQ ID NO: 1055 - DNA, 22 bp, Adeno-associated virus 1
  source 1..22: mol_type = genomic DNA
gatggctccaggaaatgggggt

SEQ ID NO: 1056 - DNA, 22 bp, Adeno-associated virus 1
  source 1..22: mol_type = genomic DNA
taacaggaggtgggggttagac

SEQ ID NO: 1057 - DNA, 22 bp, Adeno-associated virus 1
  source 1..22: mol_type = genomic DNA
gaggcctaaggatggggctttt

SEQ ID NO: 1058 - DNA, 22 bp, Adeno-associated virus 1
  source 1..22: mol_type = genomic DNA
tgtggggtggaggggacagata

SEQ ID NO: 1059 - DNA, 22 bp, Adeno-associated virus 1
  source 1..22: mol_type = genomic DNA
cagataaaagtacccagaacca

SEQ ID NO: 1060 - DNA, 22 bp, Adeno-associated virus 1
  source 1..22: mol_type = genomic DNA
agagccacattaaccggccctg

SEQ ID NO: 1061 - DNA, 22 bp, Adeno-associated virus 1
  source 1..22: mol_type = genomic DNA
aatataaggtggtcccagctcg

SEQ ID NO: 1062 - DNA, 22 bp, Adeno-associated virus 1
  source 1..22: mol_type = genomic DNA
gacacaggatccctggaggcag

SEQ ID NO: 1063 - DNA, 22 bp, Adeno-associated virus 1
  source 1..22: mol_type = genomic DNA
cagcaaacatgctgtcctgaag

SEQ ID NO: 1064 - DNA, 22 bp, Adeno-associated virus 1
  source 1..22: mol_type = genomic DNA
tgagctctcggacccctggaag

SEQ ID NO: 1065 - DNA, 22 bp, Adeno-associated virus 1
  source 1..22: mol_type = genomic DNA
ccatgacagggggctggaagag

SEQ ID NO: 1066 - DNA, 22 bp, Adeno-associated virus 1
  source 1..22: mol_type = genomic DNA
aggtggctaaagccagggagac

SEQ ID NO: 1067 - DNA, 22 bp, Adeno-associated virus 1
  source 1..22: mol_type = genomic DNA
gaaggggaggcgggacgcaagg

SEQ ID NO: 1068 - DNA, 22 bp, Adeno-associated virus 1
  source 1..22: mol_type = genomic DNA
caagggagacatccgtcggaga

SEQ ID NO: 1069 - DNA, 22 bp, Adeno-associated virus 1
  source 1..22: mol_type = genomic DNA
aggccatcctaagaaacgagag

SEQ ID NO: 1070 - DNA, 22 bp, Adeno-associated virus 1
  source 1..22: mol_type = genomic DNA
tttccttctccttctggggcct

SEQ ID NO: 1071 - DNA, 22 bp, Adeno-associated virus 1
  source 1..22: mol_type = genomic DNA
cgcctccccttcttgtaggcct

SEQ ID NO: 1072 - DNA, 22 bp, Adeno-associated virus 1
  source 1..22: mol_type = genomic DNA
ctccccttcttgtaggcctgca

SEQ ID NO: 1073 - DNA, 22 bp, Adeno-associated virus 1
  source 1..22: mol_type = genomic DNA
caccgtttttctggacaacccc

SEQ ID NO: 1074 - DNA, 22 bp, Adeno-associated virus 1
  source 1..22: mol_type = genomic DNA
aagtaccccgtctccctggctt

SEQ ID NO: 1075 - DNA, 22 bp, Adeno-associated virus 1
  source 1..22: mol_type = genomic DNA
ccatcctcttgctttctttgcc

SEQ ID NO: 1076 - DNA, 22 bp, Adeno-associated virus 1
  source 1..22: mol_type = genomic DNA
caccccgttctcctgtggattc

SEQ ID NO: 1077 - DNA, 22 bp, Adeno-associated virus 1
  source 1..22: mol_type = genomic DNA
ctgtgctagctcttccagcccc

SEQ ID NO: 1078 - DNA, 22 bp, Adeno-associated virus 1
  source 1..22: mol_type = genomic DNA
ctagctcttccagccccctgtc

SEQ ID NO: 1079 - DNA, 22 bp, Adeno-associated virus 1
  source 1..22: mol_type = genomic DNA
gggcccctatgtccacttcagg

SEQ ID NO: 1080 - DNA, 22 bp, Adeno-associated virus 1
  source 1..22: mol_type = genomic DNA
gggatcctgtgtccccgagctg

SEQ ID NO: 1081 - DNA, 22 bp, Adeno-associated virus 1
  source 1..22: mol_type = genomic DNA
ccggttaatgtggctctggttc

SEQ ID NO: 1082 - DNA, 22 bp, Adeno-associated virus 1
  source 1..22: mol_type = genomic DNA
ctgtcccctccaccccacagtg

SEQ ID NO: 1083 - DNA, 22 bp, Adeno-associated virus 1
  source 1..22: mol_type = genomic DNA
aggcctcctccttcctagtctc

SEQ ID NO: 1084 - DNA, 22 bp, Adeno-associated virus 1
  source 1..22: mol_type = genomic DNA
tgttaggcagattccttatctg

SEQ ID NO: 1085 - DNA, 22 bp, Adeno-associated virus 1
  source 1..22: mol_type = genomic DNA
ggtgacacacccccatttcctg

SEQ ID NO: 1086 - DNA, 22 bp, Adeno-associated virus 1
  source 1..22: mol_type = genomic DNA
gcgtgacctgcccggttctcag

SEQ ID NO: 1087 - DNA, 22 bp, Adeno-associated virus 1
  source 1..22: mol_type = genomic DNA
cccggttctcagtggccaccct

SEQ ID NO: 1088 - RNA, 110 nt, synthetic construct
  source 1..110: mol_type = other RNA
  modified_base 1..3: mod_base = OTHER; note = 2'O-Methyl ribonucleotide
  modified_base 1..3: mod_base = OTHER; note = Phosphorothioate linkage
  modified_base 108..110: mod_base = OTHER; note = 2'O-Methyl ribonucleotide
  modified_base 107..109: mod_base = OTHER; note = Phosphorothioate linkage
gatcctcttgtcccacagatatgttgagaatcgaaagattcttaataaggcatccttccgatgctgacttctcaccgtccgttttccaataggagcgggcggtatgtttt

SEQ ID NO: 1089 - RNA, 110 nt, synthetic construct
  source 1..110: mol_type = other RNA
  modified_base 1..3: mod_base = OTHER; note = 2'O-Methyl ribonucleotide
  modified_base 1..3: mod_base = OTHER; note = Phosphorothioate linkage
  modified_base 108..110: mod_base = OTHER; note = 2'O-Methyl ribonucleotide
  modified_base 107..109: mod_base = OTHER; note = Phosphorothioate linkage
atcctcttgtcccacagatatcgttgagaatcgaaagattcttaataaggcatccttccgatgctgacttctcaccgtccgttttccaataggagcgggcggtatgtttt

SEQ ID NO: 1090 - RNA, 110 nt, synthetic construct
  source 1..110: mol_type = other RNA
  modified_base 1..3: mod_base = OTHER; note = 2'O-Methyl ribonucleotide
  modified_base 1..3: mod_base = OTHER; note = Phosphorothioate linkage
  modified_base 108..110: mod_base = OTHER; note = 2'O-Methyl ribonucleotide
  modified_base 107..109: mod_base = OTHER; note = Phosphorothioate linkage
tcctcttgtcccacagatatccgttgagaatcgaaagattcttaataaggcatccttccgatgctgacttctcaccgtccgttttccaataggagcgggcggtatgtttt

SEQ ID NO: 1091 - RNA, 110 nt, synthetic construct
  source 1..110: mol_type = other RNA
  modified_base 1..3: mod_base = OTHER; note = 2'O-Methyl ribonucleotide
  modified_base 1..3: mod_base = OTHER; note = Phosphorothioate linkage
  modified_base 108..110: mod_base = OTHER; note = 2'O-Methyl ribonucleotide
  modified_base 107..109: mod_base = OTHER; note = Phosphorothioate linkage
tgtcccacagatatccagaaccgttgagaatcgaaagattcttaataaggcatccttccgatgctgacttctcaccgtccgttttccaataggagcgggcggtatgtttt

SEQ ID NO: 1092 - RNA, 110 nt, synthetic construct
  source 1..110: mol_type = other RNA
  modified_base 1..3: mod_base = OTHER; note = 2'O-Methyl ribonucleotide
  modified_base 1..3: mod_base = OTHER; note = Phosphorothioate linkage
  modified_base 108..110: mod_base = OTHER; note = 2'O-Methyl ribonucleotide
  modified_base 107..109: mod_base = OTHER; note = Phosphorothioate linkage
ctgaccctgccgtgtaccagctgttgagaatcgaaagattcttaataaggcatccttccgatgctgacttctcaccgtccgttttccaataggagcgggcggtatgtttt

SEQ ID NO: 1093 - RNA, 110 nt, synthetic construct
  source 1..110: mol_type = other RNA
  modified_base 1..3: mod_base = OTHER; note = 2'O-Methyl ribonucleotide
  modified_base 1..3: mod_base = OTHER; note = Phosphorothioate linkage
  modified_base 108..110: mod_base = OTHER; note = 2'O-Methyl ribonucleotide
  modified_base 107..109: mod_base = OTHER; note = Phosphorothioate linkage
tgaccctgccgtgtaccagctggttgagaatcgaaagattcttaataaggcatccttccgatgctgacttctcaccgtccgttttccaataggagcgggcggtatgtttt

SEQ ID NO: 1094 - RNA, 110 nt, synthetic construct
  source 1..110: mol_type = other RNA
  modified_base 1..3: mod_base = OTHER; note = 2'O-Methyl ribonucleotide
  modified_base 1..3: mod_base = OTHER; note = Phosphorothioate linkage
  modified_base 108..110: mod_base = OTHER; note = 2'O-Methyl ribonucleotide
  modified_base 107..109: mod_base = OTHER; note = Phosphorothioate linkage
gaccctgccgtgtaccagctgagttgagaatcgaaagattcttaataaggcatccttccgatgctgacttctcaccgtccgttttccaataggagcgggcggtatgtttt

SEQ ID NO: 1095 - RNA, 110 nt, synthetic construct; identical to SEQ ID NO: 119
  source 1..110: mol_type = other RNA
  modified_base 1..3: mod_base = OTHER; note = 2'O-Methyl ribonucleotide
  modified_base 1..3: mod_base = OTHER; note = Phosphorothioate linkage
  modified_base 108..110: mod_base = OTHER; note = 2'O-Methyl ribonucleotide
  modified_base 107..109: mod_base = OTHER; note = Phosphorothioate linkage

SEQ ID NO: 1096 - RNA, 110 nt, synthetic construct
  source 1..110: mol_type = other RNA
  modified_base 1..3: mod_base = OTHER; note = 2'O-Methyl ribonucleotide
  modified_base 1..3: mod_base = OTHER; note = Phosphorothioate linkage
  modified_base 108..110: mod_base = OTHER; note = 2'O-Methyl ribonucleotide
  modified_base 107..109: mod_base = OTHER; note = Phosphorothioate linkage
ccgtgtaccagctgagagactcgttgagaatcgaaagattcttaataaggcatccttccgatgctgacttctcaccgtccgttttccaataggagcgggcggtatgtttt

SEQ ID NO: 1097 - RNA, 110 nt, synthetic construct
  source 1..110: mol_type = other RNA
  modified_base 1..3: mod_base = OTHER; note = 2'O-Methyl ribonucleotide
  modified_base 1..3: mod_base = OTHER; note = Phosphorothioate linkage
  modified_base 108..110: mod_base = OTHER; note = 2'O-Methyl ribonucleotide
  modified_base 107..109: mod_base = OTHER; note = Phosphorothioate linkage
ctgagagactctaaatccagtggttgagaatcgaaagattcttaataaggcatccttccgatgctgacttctcaccgtccgttttccaataggagcgggcggtatgtttt

SEQ ID NO: 1098 - RNA, 110 nt, synthetic construct
  source 1..110: mol_type = other RNA
  modified_base 1..3: mod_base = OTHER; note = 2'O-Methyl ribonucleotide
  modified_base 1..3: mod_base = OTHER; note = Phosphorothioate linkage
  modified_base 108..110: mod_base = OTHER; note = 2'O-Methyl ribonucleotide
  modified_base 107..109: mod_base = OTHER; note = Phosphorothioate linkage
tgagagactctaaatccagtgagttgagaatcgaaagattcttaataaggcatccttccgatgctgacttctcaccgtccgttttccaataggagcgggcggtatgtttt

SEQ ID NO: 1099 - RNA, 110 nt, synthetic construct
  source 1..110: mol_type = other RNA
  modified_base 1..3: mod_base = OTHER; note = 2'O-Methyl ribonucleotide
  modified_base 1..3: mod_base = OTHER; note = Phosphorothioate linkage
  modified_base 108..110: mod_base = OTHER; note = 2'O-Methyl ribonucleotide
  modified_base 107..109: mod_base = OTHER; note = Phosphorothioate linkage
gacaagtctgtctgcctattcagttgagaatcgaaagattcttaataaggcatccttccgatgctgacttctcaccgtccgttttccaataggagcgggcggtatgtttt

SEQ ID NO: 1100 - RNA, 110 nt, synthetic construct
  source 1..110: mol_type = other RNA
  modified_base 1..3: mod_base = OTHER; note = 2'O-Methyl ribonucleotide
  modified_base 1..3: mod_base = OTHER; note = Phosphorothioate linkage
  modified_base 108..110: mod_base = OTHER; note = 2'O-Methyl ribonucleotide
  modified_base 107..109: mod_base = OTHER; note = Phosphorothioate linkage
tctgtctgcctattcaccgattgttgagaatcgaaagattcttaataaggcatccttccgatgctgacttctcaccgtccgttttccaataggagcgggcggtatgtttt

SEQ ID NO: 1101 - RNA, 110 nt, synthetic construct
  source 1..110: mol_type = other RNA
  modified_base 1..3: mod_base = OTHER; note = 2'O-Methyl ribonucleotide
  modified_base 1..3: mod_base = OTHER; note = Phosphorothioate linkage
  modified_base 108..110: mod_base = OTHER; note = 2'O-Methyl ribonucleotide
  modified_base 107..109: mod_base = OTHER; note = Phosphorothioate linkage
ttcaccgattttgattctcaaagttgagaatcgaaagattcttaataaggcatccttccgatgctgacttctcaccgtccgttttccaataggagcgggcggtatgtttt

SEQ ID NO: 1102 - RNA, 110 nt, synthetic construct
  source 1..110: mol_type = other RNA
  modified_base 1..3: mod_base = OTHER; note = 2'O-Methyl ribonucleotide
  modified_base 1..3: mod_base = OTHER; note = Phosphorothioate linkage
  modified_base 108..110: mod_base = OTHER; note = 2'O-Methyl ribonucleotide
  modified_base 107..109: mod_base = OTHER; note = Phosphorothioate linkage
ttgattctcaaacaaatgtgtcgttgagaatcgaaagattcttaataaggcatccttccgatgctgacttctcaccgtccgttttccaataggagcgggcggtatgtttt

SEQ ID NO: 1103 - RNA, 110 nt, synthetic construct
  source 1..110: mol_type = other RNA
  modified_base 1..3: mod_base = OTHER; note = 2'O-Methyl ribonucleotide
  modified_base 1..3: mod_base = OTHER; note = Phosphorothioate linkage
  modified_base 108..110: mod_base = OTHER; note = 2'O-Methyl ribonucleotide
  modified_base 107..109: mod_base = OTHER; note = Phosphorothioate linkage
ctcaaacaaatgtgtcacaaaggttgagaatcgaaagattcttaataaggcatccttccgatgctgacttctcaccgtccgttttccaataggagcgggcggtatgtttt

SEQ ID NO: 1104 - RNA, 110 nt, synthetic construct
  source 1..110: mol_type = other RNA
  modified_base 1..3: mod_base = OTHER; note = 2'O-Methyl ribonucleotide
  modified_base 1..3: mod_base = OTHER; note = Phosphorothioate linkage
  modified_base 108..110: mod_base = OTHER; note = 2'O-Methyl ribonucleotide
  modified_base 107..109: mod_base = OTHER; note = Phosphorothioate linkage
tcaaacaaatgtgtcacaaagtgttgagaatcgaaagattcttaataaggcatccttccgatgctgacttctcaccgtccgttttccaataggagcgggcggtatgtttt

SEQ ID NO: 1105 - RNA, 110 nt, synthetic construct
  source 1..110: mol_type = other RNA
  modified_base 1..3: mod_base = OTHER; note = 2'O-Methyl ribonucleotide
  modified_base 1..3: mod_base = OTHER; note = Phosphorothioate linkage
  modified_base 108..110: mod_base = OTHER; note = 2'O-Methyl ribonucleotide
  modified_base 107..109: mod_base = OTHER; note = Phosphorothioate linkage
caaacaaatgtgtcacaaagtagttgagaatcgaaagattcttaataaggcatccttccgatgctgacttctcaccgtccgttttccaataggagcgggcggtatgtttt

SEQ ID NO: 1106 - RNA, 110 nt, synthetic construct
  source 1..110: mol_type = other RNA
  modified_base 1..3: mod_base = OTHER; note = 2'O-Methyl ribonucleotide
  modified_base 1..3: mod_base = OTHER; note = Phosphorothioate linkage
  modified_base 108..110: mod_base = OTHER; note = 2'O-Methyl ribonucleotide
  modified_base 107..109: mod_base = OTHER; note = Phosphorothioate linkage
aatgtgtcacaaagtaaggattgttgagaatcgaaagattcttaataaggcatccttccgatgctgacttctcaccgtccgttttccaataggagcgggcggtatgtttt

SEQ ID NO: 1107 - RNA, 110 nt, synthetic construct; identical to SEQ ID NO: 121
  source 1..110: mol_type = other RNA
  modified_base 1..3: mod_base = OTHER; note = 2'O-Methyl ribonucleotide
  modified_base 1..3: mod_base = OTHER; note = Phosphorothioate linkage
  modified_base 108..110: mod_base = OTHER; note = 2'O-Methyl ribonucleotide
  modified_base 107..109: mod_base = OTHER; note = Phosphorothioate linkage

SEQ ID NO: 1108 - RNA, 110 nt, synthetic construct
  source 1..110: mol_type = other RNA
  modified_base 1..3: mod_base = OTHER; note = 2'O-Methyl ribonucleotide
  modified_base 1..3: mod_base = OTHER; note = Phosphorothioate linkage
  modified_base 108..110: mod_base = OTHER; note = 2'O-Methyl ribonucleotide
  modified_base 107..109: mod_base = OTHER; note = Phosphorothioate linkage
attctgatgtgtatatcacagagttgagaatcgaaagattcttaataaggcatccttccgatgctgacttctcaccgtccgttttccaataggagcgggcggtatgtttt

SEQ ID NO: 1109 - RNA, 110 nt, synthetic construct; identical to SEQ ID NO: 974
  source 1..110: mol_type = other RNA
  modified_base 1..3: mod_base = OTHER; note = 2'O-Methyl ribonucleotide
  modified_base 1..3: mod_base = OTHER; note = Phosphorothioate linkage
  modified_base 108..110: mod_base = OTHER; note = 2'O-Methyl ribonucleotide
  modified_base 107..109: mod_base = OTHER; note = Phosphorothioate linkage

SEQ ID NO: 1110 - RNA, 110 nt, synthetic construct
  source 1..110: mol_type = other RNA
  modified_base 1..3: mod_base = OTHER; note = 2'O-Methyl ribonucleotide
  modified_base 1..3: mod_base = OTHER; note = Phosphorothioate linkage
  modified_base 108..110: mod_base = OTHER; note = 2'O-Methyl ribonucleotide
  modified_base 107..109: mod_base = OTHER; note = Phosphorothioate linkage
cacagacaaaactgtgctagacgttgagaatcgaaagattcttaataaggcatccttccgatgctgacttctcaccgtccgttttccaataggagcgggcggtatgtttt

SEQ ID NO: 1111 - RNA, 110 nt, synthetic construct
  source 1..110: mol_type = other RNA
  modified_base 1..3: mod_base = OTHER; note = 2'O-Methyl ribonucleotide
  modified_base 1..3: mod_base = OTHER; note = Phosphorothioate linkage
  modified_base 108..110: mod_base = OTHER; note = 2'O-Methyl ribonucleotide
  modified_base 107..109: mod_base = OTHER; note = Phosphorothioate linkage
acagacaaaactgtgctagacagttgagaatcgaaagattcttaataaggcatccttccgatgctgacttctcaccgtccgttttccaataggagcgggcggtatgtttt

SEQ ID NO: 1112 - RNA, 110 nt, synthetic construct
  source 1..110: mol_type = other RNA
  modified_base 1..3: mod_base = OTHER; note = 2'O-Methyl ribonucleotide
  modified_base 1..3: mod_base = OTHER; note = Phosphorothioate linkage
  modified_base 108..110: mod_base = OTHER; note = 2'O-Methyl ribonucleotide
  modified_base 107..109: mod_base = OTHER; note = Phosphorothioate linkage
cagacaaaactgtgctagacatgttgagaatcgaaagattcttaataaggcatccttccgatgctgacttctcaccgtccgttttccaataggagcgggcggtatgtttt

SEQ ID NO: 1113 - RNA, 110 nt, synthetic construct
  source 1..110: mol_type = other RNA
  modified_base 1..3: mod_base = OTHER; note = 2'O-Methyl ribonucleotide
  modified_base 1..3: mod_base = OTHER; note = Phosphorothioate linkage
  modified_base 108..110: mod_base = OTHER; note = 2'O-Methyl ribonucleotide
  modified_base 107..109: mod_base = OTHER; note = Phosphorothioate linkage
aactgtgctagacatgaggtctgttgagaatcgaaagattcttaataaggcatccttccgatgctgacttctcaccgtccgttttccaataggagcgggcggtatgtttt

SEQ ID NO: 1114 - RNA, 110 nt, synthetic construct
  source 1..110: mol_type = other RNA
  modified_base 1..3: mod_base = OTHER; note = 2'O-Methyl ribonucleotide
  modified_base 1..3: mod_base = OTHER; note = Phosphorothioate linkage
  modified_base 108..110: mod_base = OTHER; note = 2'O-Methyl ribonucleotide
  modified_base 107..109: mod_base = OTHER; note = Phosphorothioate linkage
actgtgctagacatgaggtctagttgagaatcgaaagattcttaataaggcatccttccgatgctgacttctcaccgtccgttttccaataggagcgggcggtatgtttt

SEQ ID NO: 1115 - RNA, 110 nt, synthetic construct
  source 1..110: mol_type = other RNA
  modified_base 1..3: mod_base = OTHER; note = 2'O-Methyl ribonucleotide
  modified_base 1..3: mod_base = OTHER; note = Phosphorothioate linkage
  modified_base 108..110: mod_base = OTHER; note = 2'O-Methyl ribonucleotide
  modified_base 107..109: mod_base = OTHER; note = Phosphorothioate linkage
tagacatgaggtctatggacttgttgagaatcgaaagattcttaataaggcatccttccgatgctgacttctcaccgtccgttttccaataggagcgggcggtatgtttt

SEQ ID NO: 1116 - RNA, 110 nt, synthetic construct
  source 1..110: mol_type = other RNA
  modified_base 1..3: mod_base = OTHER; note = 2'O-Methyl ribonucleotide
  modified_base 1..3: mod_base = OTHER; note = Phosphorothioate linkage
  modified_base 108..110: mod_base = OTHER; note = 2'O-Methyl ribonucleotide
  modified_base 107..109: mod_base = OTHER; note = Phosphorothioate linkage
aggtctatggacttcaagagcagttgagaatcgaaagattcttaataaggcatccttccgatgctgacttctcaccgtccgttttccaataggagcgggcggtatgtttt

SEQ ID NO: 1117 - RNA, 110 nt, synthetic construct
  source 1..110: mol_type = other RNA
  modified_base 1..3: mod_base = OTHER; note = 2'O-Methyl ribonucleotide
  modified_base 1..3: mod_base = OTHER; note = Phosphorothioate linkage
  modified_base 108..110: mod_base = OTHER; note = 2'O-Methyl ribonucleotide
  modified_base 107..109: mod_base = OTHER; note = Phosphorothioate linkage
ggacttcaagagcaacagtgctgttgagaatcgaaagattcttaataaggcatccttccgatgctgacttctcaccgtccgttttccaataggagcgggcggtatgtttt

SEQ ID NO: 1118 - RNA, 110 nt, synthetic construct
  source 1..110: mol_type = other RNA
  modified_base 1..3: mod_base = OTHER; note = 2'O-Methyl ribonucleotide
  modified_base 1..3: mod_base = OTHER; note = Phosphorothioate linkage
  modified_base 108..110: mod_base = OTHER; note = 2'O-Methyl ribonucleotide
  modified_base 107..109: mod_base = OTHER; note = Phosphorothioate linkage
tcaagagcaacagtgctgtggcgttgagaatcgaaagattcttaataaggcatccttccgatgctgacttctcaccgtccgttttccaataggagcgggcggtatgtttt

SEQ ID NO: 1119 - RNA, 110 nt, synthetic construct; identical to SEQ ID NO: 122
  source 1..110: mol_type = other RNA
  modified_base 1..3: mod_base = OTHER; note = 2'O-Methyl ribonucleotide
  modified_base 1..3: mod_base = OTHER; note = Phosphorothioate linkage
  modified_base 108..110: mod_base = OTHER; note = 2'O-Methyl ribonucleotide
  modified_base 107..109: mod_base = OTHER; note = Phosphorothioate linkage

SEQ ID NO: 1120 - RNA, 110 nt, synthetic construct
  source 1..110: mol_type = other RNA
  modified_base 1..3: mod_base = OTHER; note = 2'O-Methyl ribonucleotide
  modified_base 1..3: mod_base = OTHER; note = Phosphorothioate linkage
  modified_base 108..110: mod_base = OTHER; note = 2'O-Methyl ribonucleotide
  modified_base 107..109: mod_base = OTHER; note = Phosphorothioate linkage
acagtgctgtggcctggagcaagttgagaatcgaaagattcttaataaggcatccttccgatgctgacttctcaccgtccgttttccaataggagcgggcggtatgtttt

SEQ ID NO: 1121 - RNA, 110 nt, synthetic construct
  source 1..110: mol_type = other RNA
  modified_base 1..3: mod_base = OTHER; note = 2'O-Methyl ribonucleotide
  modified_base 1..3: mod_base = OTHER; note = Phosphorothioate linkage
  modified_base 108..110: mod_base = OTHER; note = 2'O-Methyl ribonucleotide
  modified_base 107..109: mod_base = OTHER; note = Phosphorothioate linkage
gctgtggcctggagcaacaaatgttgagaatcgaaagattcttaataaggcatccttccgatgctgacttctcaccgtccgttttccaataggagcgggcggtatgtttt

SEQ ID NO: 1122 - RNA, 110 nt, synthetic construct
  source 1..110: mol_type = other RNA
  modified_base 1..3: mod_base = OTHER; note = 2'O-Methyl ribonucleotide
  modified_base 1..3: mod_base = OTHER; note = Phosphorothioate linkage
  modified_base 108..110: mod_base = OTHER; note = 2'O-Methyl ribonucleotide
  modified_base 107..109: mod_base = OTHER; note = Phosphorothioate linkage
aacaaatctgactttgcatgtggttgagaatcgaaagattcttaataaggcatccttccgatgctgacttctcaccgtccgttttccaataggagcgggcggtatgtttt

SEQ ID NO: 1123 - RNA, 110 nt, synthetic construct; identical to SEQ ID NO: 975
  source 1..110: mol_type = other RNA
  modified_base 1..3: mod_base = OTHER; note = 2'O-Methyl ribonucleotide
  modified_base 1..3: mod_base = OTHER; note = Phosphorothioate linkage
  modified_base 108..110: mod_base = OTHER; note = 2'O-Methyl ribonucleotide
  modified_base 107..109: mod_base = OTHER; note = Phosphorothioate linkage

SEQ ID NO: 1124 - RNA, 110 nt, synthetic construct
  source 1..110: mol_type = other RNA
  modified_base 1..3: mod_base = OTHER; note = 2'O-Methyl ribonucleotide
  modified_base 1..3: mod_base = OTHER; note = Phosphorothioate linkage
  modified_base 108..110: mod_base = OTHER; note = 2'O-Methyl ribonucleotide
  modified_base 107..109: mod_base = OTHER; note = Phosphorothioate linkage
ccttcaacaacagcattattccgttgagaatcgaaagattcttaataaggcatccttccgatgctgacttctcaccgtccgttttccaataggagcgggcggtatgtttt

SEQ ID NO: 1125 - RNA, 110 nt, synthetic construct; identical to SEQ ID NO: 977
  source 1..110: mol_type = other RNA
  modified_base 1..3: mod_base = OTHER; note = 2'O-Methyl ribonucleotide
  modified_base 1..3: mod_base = OTHER; note = Phosphorothioate linkage
  modified_base 108..110: mod_base = OTHER; note = 2'O-Methyl ribonucleotide
  modified_base 107..109: mod_base = OTHER; note = Phosphorothioate linkage

SEQ ID NO: 1126 - RNA, 110 nt, synthetic construct
  source 1..110: mol_type = other RNA
  modified_base 1..3: mod_base = OTHER; note = 2'O-Methyl ribonucleotide
  modified_base 1..3: mod_base = OTHER; note = Phosphorothioate linkage
  modified_base 108..110: mod_base = OTHER; note = 2'O-Methyl ribonucleotide
  modified_base 107..109: mod_base = OTHER; note = Phosphorothioate linkage
attccagaagacaccttcttccgttgagaatcgaaagattcttaataaggcatccttccgatgctgacttctcaccgtccgttttccaataggagcgggcggtatgtttt

SEQ ID NO: 1127 - RNA, 110 nt, synthetic construct
  source 1..110: mol_type = other RNA
  modified_base 1..3: mod_base = OTHER; note = 2'O-Methyl ribonucleotide
  modified_base 1..3: mod_base = OTHER; note = Phosphorothioate linkage
  modified_base 108..110: mod_base = OTHER; note = 2'O-Methyl ribonucleotide
  modified_base 107..109: mod_base = OTHER; note = Phosphorothioate linkage
acaccttcttccccagcccagggttgagaatcgaaagattcttaataaggcatccttccgatgctgacttctcaccgtccgttttccaataggagcgggcggtatgtttt

SEQ ID NO: 1128 - RNA, 110 nt, synthetic construct
  source 1..110: mol_type = other RNA
  modified_base 1..3: mod_base = OTHER; note = 2'O-Methyl ribonucleotide
  modified_base 1..3: mod_base = OTHER; note = Phosphorothioate linkage
  modified_base 108..110: mod_base = OTHER; note = 2'O-Methyl ribonucleotide
  modified_base 107..109: mod_base = OTHER; note = Phosphorothioate linkage
ctgcccttacctgggctggggagttgagaatcgaaagattcttaataaggcatccttccgatgctgacttctcaccgtccgttttccaataggagcgggcggtatgtttt

SEQ ID NO: 1129 - RNA, 110 nt, synthetic construct
  source 1..110: mol_type = other RNA
  modified_base 1..3: mod_base = OTHER; note = 2'O-Methyl ribonucleotide
  modified_base 1..3: mod_base = OTHER; note = Phosphorothioate linkage
  modified_base 108..110: mod_base = OTHER; note = 2'O-Methyl ribonucleotide
  modified_base 107..109: mod_base = OTHER; note = Phosphorothioate linkage
gcccttacctgggctggggaaggttgagaatcgaaagattcttaataaggcatccttccgatgctgacttctcaccgtccgttttccaataggagcgggcggtatgtttt

SEQ ID NO: 1130 - RNA, 110 nt, synthetic construct
  source 1..110: mol_type = other RNA
  modified_base 1..3: mod_base = OTHER; note = 2'O-Methyl ribonucleotide
  modified_base 1..3: mod_base = OTHER; note = Phosphorothioate linkage
  modified_base 108..110: mod_base = OTHER; note = 2'O-Methyl ribonucleotide
  modified_base 107..109: mod_base = OTHER; note = Phosphorothioate linkage
gggctggggaagaaggtgtcttgttgagaatcgaaagattcttaataaggcatccttccgatgctgacttctcaccgtccgttttccaataggagcgggcggtatgtttt

SEQ ID NO: 1131 - RNA, 110 nt, synthetic construct
  source 1..110: mol_type = other RNA
  modified_base 1..3: mod_base = OTHER; note = 2'O-Methyl ribonucleotide
  modified_base 1..3: mod_base = OTHER; note = Phosphorothioate linkage
  modified_base 108..110: mod_base = OTHER; note = 2'O-Methyl ribonucleotide
  modified_base 107..109: mod_base = OTHER; note = Phosphorothioate linkage
ggggaagaaggtgtcttctggagttgagaatcgaaagattcttaataaggcatccttccgatgctgacttctcaccgtccgttttccaataggagcgggcggtatgtttt

SEQ ID NO: 1132 - RNA, 110 nt, synthetic construct
  source 1..110: mol_type = other RNA
  modified_base 1..3: mod_base = OTHER; note = 2'O-Methyl ribonucleotide
  modified_base 1..3: mod_base = OTHER; note = Phosphorothioate linkage
  modified_base 108..110: mod_base = OTHER; note = 2'O-Methyl ribonucleotide
  modified_base 107..109: mod_base = OTHER; note = Phosphorothioate linkage
tcttctggaataatgctgttgtgttgagaatcgaaagattcttaataaggcatccttccgatgctgacttctcaccgtccgttttccaataggagcgggcggtatgtttt

SEQ ID NO: 1133 - RNA, 110 nt, synthetic construct
  source 1..110: mol_type = other RNA
  modified_base 1..3: mod_base = OTHER; note = 2'O-Methyl ribonucleotide
  modified_base 1..3: mod_base = OTHER; note = Phosphorothioate linkage
  modified_base 108..110: mod_base = OTHER; note = 2'O-Methyl ribonucleotide
  modified_base 107..109: mod_base = OTHER; note = Phosphorothioate linkage
ttctggaataatgctgttgttggttgagaatcgaaagattcttaataaggcatccttccgatgctgacttctcaccgtccgttttccaataggagcgggcggtatgtttt

SEQ ID NO: 1134 - RNA, 110 nt, synthetic construct
  source 1..110: mol_type = other RNA
  modified_base 1..3: mod_base = OTHER; note = 2'O-Methyl ribonucleotide
  modified_base 1..3: mod_base = OTHER; note = Phosphorothioate linkage
  modified_base 108..110: mod_base = OTHER; note = 2'O-Methyl ribonucleotide
  modified_base 107..109: mod_base = OTHER; note = Phosphorothioate linkage
gttgttgaaggcgtttgcacatgttgagaatcgaaagattcttaataaggcatccttccgatgctgacttctcaccgtccgttttccaataggagcgggcggtatgtttt

SEQ ID NO: 1135 - RNA, 110 nt, synthetic construct
  source 1..110: mol_type = other RNA
  modified_base 1..3: mod_base = OTHER; note = 2'O-Methyl ribonucleotide
  modified_base 1..3: mod_base = OTHER; note = Phosphorothioate linkage
  modified_base 108..110: mod_base = OTHER; note = 2'O-Methyl ribonucleotide
  modified_base 107..109: mod_base = OTHER; note = Phosphorothioate linkage
ttgttgaaggcgtttgcacatggttgagaatcgaaagattcttaataaggcatccttccgatgctgacttctcaccgtccgttttccaataggagcgggcggtatgtttt

SEQ ID NO: 1136 - RNA, 110 nt, synthetic construct
  source 1..110: mol_type = other RNA
  modified_base 1..3: mod_base = OTHER; note = 2'O-Methyl ribonucleotide
  modified_base 1..3: mod_base = OTHER; note = Phosphorothioate linkage
  modified_base 108..110: mod_base = OTHER; note = 2'O-Methyl ribonucleotide
  modified_base 107..109: mod_base = OTHER; note = Phosphorothioate linkage
gaaggcgtttgcacatgcaaaggttgagaatcgaaagattcttaataaggcatccttccgatgctgacttctcaccgtccgttttccaataggagcgggcggtatgtttt

SEQ ID NO: 1137 - RNA, 110 nt, synthetic construct
  source 1..110: mol_type = other RNA
  modified_base 1..3: mod_base = OTHER; note = 2'O-Methyl ribonucleotide
  modified_base 1..3: mod_base = OTHER; note = Phosphorothioate linkage
  modified_base 108..110: mod_base = OTHER; note = 2'O-Methyl ribonucleotide
  modified_base 107..109: mod_base = OTHER; note = Phosphorothioate linkage
aaggcgtttgcacatgcaaagtgttgagaatcgaaagattcttaataaggcatccttccgatgctgacttctcaccgtccgttttccaataggagcgggcggtatgtttt

SEQ ID NO: 1138 - RNA, 110 nt, synthetic construct
  source 1..110: mol_type = other RNA
  modified_base 1..3: mod_base = OTHER; note = 2'O-Methyl ribonucleotide
  modified_base 1..3: mod_base = OTHER; note = Phosphorothioate linkage
  modified_base 108..110: mod_base = OTHER; note = 2'O-Methyl ribonucleotide
  modified_base 107..109: mod_base = OTHER; note = Phosphorothioate linkage
atgcaaagtcagatttgttgctgttgagaatcgaaagattcttaataaggcatccttccgatgctgacttctcaccgtccgttttccaataggagcgggcggtatgtttt

SEQ ID NO: 1139 - RNA, 110 nt, synthetic construct; identical to SEQ ID NO: 979
  source 1..110: mol_type = other RNA
  modified_base 1..3: mod_base = OTHER; note = 2'O-Methyl ribonucleotide
  modified_base 1..3: mod_base = OTHER; note = Phosphorothioate linkage
  modified_base 108..110: mod_base = OTHER; note = 2'O-Methyl ribonucleotide
  modified_base 107..109: mod_base = OTHER; note = Phosphorothioate linkage

SEQ ID NO: 1140 - RNA, 110 nt, synthetic construct
  source 1..110: mol_type = other RNA
  modified_base 1..3: mod_base = OTHER; note = 2'O-Methyl ribonucleotide
  modified_base 1..3: mod_base = OTHER; note = Phosphorothioate linkage
  modified_base 108..110: mod_base = OTHER; note = 2'O-Methyl ribonucleotide
  modified_base 107..109: mod_base = OTHER; note = Phosphorothioate linkage
ccaggccacagcactgttgctcgttgagaatcgaaagattcttaataaggcatccttccgatgctgacttctcaccgtccgttttccaataggagcgggcggtatgtttt

SEQ ID NO: 1141 - RNA, 110 nt, synthetic construct
  source 1..110: mol_type = other RNA
  modified_base 1..3: mod_base = OTHER; note = 2'O-Methyl ribonucleotide
  modified_base 1..3: mod_base = OTHER; note = Phosphorothioate linkage
  modified_base 108..110: mod_base = OTHER; note = 2'O-Methyl ribonucleotide
  modified_base 107..109: mod_base = OTHER; note = Phosphorothioate linkage
caggccacagcactgttgctctgttgagaatcgaaagattcttaataaggcatccttccgatgctgacttctcaccgtccgttttccaataggagcgggcggtatgtttt

SEQ ID NO: 1142 - RNA, 110 nt, synthetic construct
  source 1..110: mol_type = other RNA
  modified_base 1..3: mod_base = OTHER; note = 2'O-Methyl ribonucleotide
  modified_base 1..3: mod_base = OTHER; note = Phosphorothioate linkage
  modified_base 108..110: mod_base = OTHER; note = 2'O-Methyl ribonucleotide
  modified_base 107..109: mod_base = OTHER; note = Phosphorothioate linkage
aggccacagcactgttgctcttgttgagaatcgaaagattcttaataaggcatccttccgatgctgacttctcaccgtccgttttccaataggagcgggcggtatgtttt

SEQ ID NO: 1143 - RNA, 110 nt, synthetic construct
  source 1..110: mol_type = other RNA
  modified_base 1..3: mod_base = OTHER; note = 2'O-Methyl ribonucleotide
  modified_base 1..3: mod_base = OTHER; note = Phosphorothioate linkage
  modified_base 108..110: mod_base = OTHER; note = 2'O-Methyl ribonucleotide
  modified_base 107..109: mod_base = OTHER; note = Phosphorothioate linkage
agcactgttgctcttgaagtccgttgagaatcgaaagattcttaataaggcatccttccgatgctgacttctcaccgtccgttttccaataggagcgggcggtatgtttt

SEQ ID NO: 1144 - RNA, 110 nt, synthetic construct
  source 1..110: mol_type = other RNA
  modified_base 1..3: mod_base = OTHER; note = 2'O-Methyl ribonucleotide
  modified_base 1..3: mod_base = OTHER; note = Phosphorothioate linkage
  modified_base 108..110: mod_base = OTHER; note = 2'O-Methyl ribonucleotide
  modified_base 107..109: mod_base = OTHER; note = Phosphorothioate linkage
gcactgttgctcttgaagtccagttgagaatcgaaagattcttaataaggcatccttccgatgctgacttctcaccgtccgttttccaataggagcgggcggtatgtttt

SEQ ID NO: 1145 - RNA, 110 nt, synthetic construct; identical to SEQ ID NO: 980
  source 1..110: mol_type = other RNA
  modified_base 1..3: mod_base = OTHER; note = 2'O-Methyl ribonucleotide
  modified_base 1..3: mod_base = OTHER; note = Phosphorothioate linkage
  modified_base 108..110: mod_base = OTHER; note = 2'O-Methyl ribonucleotide
  modified_base 107..109: mod_base = OTHER; note = Phosphorothioate linkage

SEQ ID NO: 1146 - RNA, 110 nt, synthetic construct
  source 1..110: mol_type = other RNA
  modified_base 1..3: mod_base = OTHER; note = 2'O-Methyl ribonucleotide
  modified_base 1..3: mod_base = OTHER; note = Phosphorothioate linkage
  modified_base 108..110: mod_base = OTHER; note = 2'O-Methyl ribonucleotide
  modified_base 107..109: mod_base = OTHER; note = Phosphorothioate linkage
gtccatagacctcatgtctagcgttgagaatcgaaagattcttaataaggcatccttccgatgctgacttctcaccgtccgttttccaataggagcgggcggtatgtttt

SEQ ID NO: 1147 - RNA, 110 nt, synthetic construct; identical to SEQ ID NO: 981
  source 1..110: mol_type = other RNA
  modified_base 1..3: mod_base = OTHER; note = 2'O-Methyl ribonucleotide
  modified_base 1..3: mod_base = OTHER; note = Phosphorothioate linkage
  modified_base 108..110: mod_base = OTHER; note = 2'O-Methyl ribonucleotide
  modified_base 107..109: mod_base = OTHER; note = Phosphorothioate linkage

SEQ ID NO: 1148 - RNA, 110 nt, synthetic construct
  source 1..110: mol_type = other RNA
  modified_base 1..3: mod_base = OTHER; note = 2'O-Methyl ribonucleotide
  modified_base 1..3: mod_base = OTHER; note = Phosphorothioate linkage
  modified_base 108..110: mod_base = OTHER; note = 2'O-Methyl ribonucleotide
  modified_base 107..109: mod_base = OTHER; note = Phosphorothioate linkage
agttttgtctgtgatatacacagttgagaatcgaaagattcttaataaggcatccttccgatgctgacttctcaccgtccgttttccaataggagcgggcggtatgtttt

SEQ ID NO: 1149 - RNA, 110 nt, synthetic construct; identical to SEQ ID NO: 124
  source 1..110: mol_type = other RNA
  modified_base 1..3: mod_base = OTHER; note = 2'O-Methyl ribonucleotide
  modified_base 1..3: mod_base = OTHER; note = Phosphorothioate linkage
  modified_base 108..110: mod_base = OTHER; note = 2'O-Methyl ribonucleotide
  modified_base 107..109: mod_base = OTHER; note = Phosphorothioate linkage

SEQ ID NO: 1150 - RNA, 110 nt, synthetic construct
  source 1..110: mol_type = other RNA
  modified_base 1..3: mod_base = OTHER; note = 2'O-Methyl ribonucleotide
  modified_base 1..3: mod_base = OTHER; note = Phosphorothioate linkage
  modified_base 108..110: mod_base = OTHER; note = 2'O-Methyl ribonucleotide
  modified_base 107..109: mod_base = OTHER; note = Phosphorothioate linkage
ttttgtctgtgatatacacatcgttgagaatcgaaagattcttaataaggcatccttccgatgctgacttctcaccgtccgttttccaataggagcgggcggtatgtttt

SEQ ID NO: 1151 - RNA, 110 nt, synthetic construct; identical to SEQ ID NO: 982
  source 1..110: mol_type = other RNA
  modified_base 1..3: mod_base = OTHER; note = 2'O-Methyl ribonucleotide
  modified_base 1..3: mod_base = OTHER; note = Phosphorothioate linkage
  modified_base 108..110: mod_base = OTHER; note = 2'O-Methyl ribonucleotide
  modified_base 107..109: mod_base = OTHER; note = Phosphorothioate linkage

SEQ ID NO: 1152 - RNA, 110 nt, synthetic construct
  source 1..110: mol_type = other RNA
  modified_base 1..3: mod_base = OTHER; note = 2'O-Methyl ribonucleotide
  modified_base 1..3: mod_base = OTHER; note = Phosphorothioate linkage
  modified_base 108..110: mod_base = OTHER; note = 2'O-Methyl ribonucleotide
  modified_base 107..109: mod_base = OTHER; note = Phosphorothioate linkage
cttactttgtgacacatttgttgttgagaatcgaaagattcttaataaggcatccttccgatgctgacttctcaccgtccgttttccaataggagcgggcggtatgtttt

SEQ ID NO: 1153 - RNA, 110 nt, synthetic construct; identical to SEQ ID NO: 125
  source 1..110: mol_type = other RNA
  modified_base 1..3: mod_base = OTHER; note = 2'O-Methyl ribonucleotide
  modified_base 1..3: mod_base = OTHER; note = Phosphorothioate linkage
  modified_base 108..110: mod_base = OTHER; note = 2'O-Methyl ribonucleotide
  modified_base 107..109: mod_base = OTHER; note = Phosphorothioate linkage

SEQ ID NO: 1154 - RNA, 110 nt, synthetic construct; identical to SEQ ID NO: 126
  source 1..110: mol_type = other RNA
  modified_base 1..3: mod_base = OTHER; note = 2'O-Methyl ribonucleotide
  modified_base 1..3: mod_base = OTHER; note = Phosphorothioate linkage
  modified_base 108..110: mod_base = OTHER; note = 2'O-Methyl ribonucleotide
  modified_base 107..109: mod_base = OTHER; note = Phosphorothioate linkage

SEQ ID NO: 1155 - RNA, 110 nt, synthetic construct; identical to SEQ ID NO: 127
  source 1..110: mol_type = other RNA
  modified_base 1..3: mod_base = OTHER; note = 2'O-Methyl ribonucleotide
  modified_base 1..3: mod_base = OTHER; note = Phosphorothioate linkage
  modified_base 108..110: mod_base = OTHER; note = 2'O-Methyl ribonucleotide
  modified_base 107..109: mod_base = OTHER; note = Phosphorothioate linkage

SEQ ID NO: 1156 - RNA, 110 nt, synthetic construct
  source 1..110: mol_type = other RNA
  modified_base 1..3: mod_base = OTHER; note = 2'O-Methyl ribonucleotide
  modified_base 1..3: mod_base = OTHER; note = Phosphorothioate linkage
  modified_base 108..110: mod_base = OTHER; note = 2'O-Methyl ribonucleotide
  modified_base 107..109: mod_base = OTHER; note = Phosphorothioate linkage
atcaaaatcggtgaataggcaggttgagaatcgaaagattcttaataaggcatccttccgatgctgacttctcaccgtccgttttccaataggagcgggcggtatgtttt

SEQ ID NO: 1157 - RNA, 110 nt, synthetic construct
  source 1..110: mol_type = other RNA
  modified_base 1..3: mod_base = OTHER; note = 2'O-Methyl ribonucleotide
  modified_base 1..3: mod_base = OTHER; note = Phosphorothioate linkage
  modified_base 108..110: mod_base = OTHER; note = 2'O-Methyl ribonucleotide
  modified_base 107..109: mod_base = OTHER; note = Phosphorothioate linkage
tcaaaatcggtgaataggcagagttgagaatcgaaagattcttaataaggcatccttccgatgctgacttctcaccgtccgttttccaataggagcgggcggtatgtttt

SEQ ID NO: 1158 - RNA, 110 nt, synthetic construct
  source 1..110: mol_type = other RNA
  modified_base 1..3: mod_base = OTHER; note = 2'O-Methyl ribonucleotide
  modified_base 1..3: mod_base = OTHER; note = Phosphorothioate linkage
  modified_base 108..110: mod_base = OTHER; note = 2'O-Methyl ribonucleotide
  modified_base 107..109: mod_base = OTHER; note = Phosphorothioate linkage
gaataggcagacagacttgtcagttgagaatcgaaagattcttaataaggcatccttccgatgctgacttctcaccgtccgttttccaataggagcgggcggtatgtttt

SEQ ID NO: 1159 - RNA, 110 nt, synthetic construct
  source 1..110: mol_type = other RNA
  modified_base 1..3: mod_base = OTHER; note = 2'O-Methyl ribonucleotide
  modified_base 1..3: mod_base = OTHER; note = Phosphorothioate linkage
  modified_base 108..110: mod_base = OTHER; note = 2'O-Methyl ribonucleotide
  modified_base 107..109: mod_base = OTHER; note = Phosphorothioate linkage
aataggcagacagacttgtcacgttgagaatcgaaagattcttaataaggcatccttccgatgctgacttctcaccgtccgttttccaataggagcgggcggtatgtttt

SEQ ID NO: 1160 - RNA, 110 nt, synthetic construct
  source 1..110: mol_type = other RNA
  modified_base 1..3: mod_base = OTHER; note = 2'O-Methyl ribonucleotide
  modified_base 1..3: mod_base = OTHER; note = Phosphorothioate linkage
  modified_base 108..110: mod_base = OTHER; note = 2'O-Methyl ribonucleotide
  modified_base 107..109: mod_base = OTHER; note = Phosphorothioate linkage
gcagacagacttgtcactggatgttgagaatcgaaagattcttaataaggcatccttccgatgctgacttctcaccgtccgttttccaataggagcgggcggtatgtttt

SEQ ID NO: 1161 - RNA, 110 nt, synthetic construct
  source 1..110: mol_type = other RNA
  modified_base 1..3: mod_base = OTHER; note = 2'O-Methyl ribonucleotide
  modified_base 1..3: mod_base = OTHER; note = Phosphorothioate linkage
  modified_base 108..110: mod_base = OTHER; note = 2'O-Methyl ribonucleotide
  modified_base 107..109: mod_base = OTHER; note = Phosphorothioate linkage
cagacagacttgtcactggattgttgagaatcgaaagattcttaataaggcatccttccgatgctgacttctcaccgtccgttttccaataggagcgggcggtatgtttt

SEQ ID NO: 1162 - RNA, 110 nt, synthetic construct
  source 1..110: mol_type = other RNA
  modified_base 1..3: mod_base = OTHER; note = 2'O-Methyl ribonucleotide
  modified_base 1..3: mod_base = OTHER; note = Phosphorothioate linkage
  modified_base 108..110: mod_base = OTHER; note = 2'O-Methyl ribonucleotide
  modified_base 107..109: mod_base = OTHER; note = Phosphorothioate linkage
agacagacttgtcactggatttgttgagaatcgaaagattcttaataaggcatccttccgatgctgacttctcaccgtccgttttccaataggagcgggcggtatgtttt

SEQ ID NO: 1163 - RNA, 110 nt, synthetic construct; identical to SEQ ID NO: 984
  source 1..110: mol_type = other RNA
  modified_base 1..3: mod_base = OTHER; note = 2'O-Methyl ribonucleotide
  modified_base 1..3: mod_base = OTHER; note = Phosphorothioate linkage
  modified_base 108..110: mod_base = OTHER; note = 2'O-Methyl ribonucleotide
  modified_base 107..109: mod_base = OTHER; note = Phosphorothioate linkage

SEQ ID NO: 1164 - RNA, 110 nt, synthetic construct
  source 1..110: mol_type = other RNA
  modified_base 1..3: mod_base = OTHER; note = 2'O-Methyl ribonucleotide
  modified_base 1..3: mod_base = OTHER; note = Phosphorothioate linkage
  modified_base 108..110: mod_base = OTHER; note = 2'O-Methyl ribonucleotide
  modified_base 107..109: mod_base = OTHER; note = Phosphorothioate linkage
agagtctctcagctggtacacggttgagaatcgaaagattcttaataaggcatccttccgatgctgacttctcaccgtccgttttccaataggagcgggcggtatgtttt

SEQ ID NO: 1165 - RNA, 110 nt, synthetic construct
  source 1..110: mol_type = other RNA
  modified_base 1..3: mod_base = OTHER; note = 2'O-Methyl ribonucleotide
  modified_base 1..3: mod_base = OTHER; note = Phosphorothioate linkage
  modified_base 108..110: mod_base = OTHER; note = 2'O-Methyl ribonucleotide
  modified_base 107..109: mod_base = OTHER; note = Phosphorothioate linkage
gagtctctcagctggtacacgggttgagaatcgaaagattcttaataaggcatccttccgatgctgacttctcaccgtccgttttccaataggagcgggcggtatgtttt

SEQ ID NO: 1166 - RNA, 110 nt, synthetic construct
  source 1..110: mol_type = other RNA
  modified_base 1..3: mod_base = OTHER; note = 2'O-Methyl ribonucleotide
  modified_base 1..3: mod_base = OTHER; note = Phosphorothioate linkage
  modified_base 108..110: mod_base = OTHER; note = 2'O-Methyl ribonucleotide
  modified_base 107..109: mod_base = OTHER; note = Phosphorothioate linkage
tctcagctggtacacggcaggggttgagaatcgaaagattcttaataaggcatccttccgatgctgacttctcaccgtccgttttccaataggagcgggcggtatgtttt

SEQ ID NO: 1167 - RNA, 110 nt, synthetic construct
  source 1..110: mol_type = other RNA
ctcagctggtacacggcagggtgttgagaatcgaaagattcttaataaggcatccttccgatgctgacttctcaccgtccgttttccaataggagcgggcggtatgtttt

SEQ ID NO: 1168 - RNA, 110 nt, synthetic construct
  source 1..110: mol_type = other RNA
  modified_base 1..3: mod_base = OTHER; note = 2'O-Methyl ribonucleotide
  modified_base 1..3: mod_base = OTHER; note = Phosphorothioate linkage
  modified_base 108..110: mod_base = OTHER; note = 2'O-Methyl ribonucleotide
  modified_base 107..109: mod_base = OTHER; note = Phosphorothioate linkage
tcagctggtacacggcagggtcgttgagaatcgaaagattcttaataaggcatccttccgatgctgacttctcaccgtccgttttccaataggagcgggcggtatgtttt

SEQ ID NO: 1169 - RNA, 110 nt, synthetic construct; identical to SEQ ID NO: 985
  source 1..110: mol_type = other RNA
  modified_base 1..3: mod_base = OTHER; note = 2'O-Methyl ribonucleotide
  modified_base 1..3: mod_base = OTHER; note = Phosphorothioate linkage
  modified_base 108..110: mod_base = OTHER; note = 2'O-Methyl ribonucleotide
  modified_base 107..109: mod_base = OTHER; note = Phosphorothioate linkage

SEQ ID NO: 1170 - RNA, 110 nt, synthetic construct
  source 1..110: mol_type = other RNA
  modified_base 1..3: mod_base = OTHER; note = 2'O-Methyl ribonucleotide
  modified_base 1..3: mod_base = OTHER; note = Phosphorothioate linkage
  modified_base 108..110: mod_base = OTHER; note = 2'O-Methyl ribonucleotide
  modified_base 107..109: mod_base = OTHER; note = Phosphorothioate linkage
agggtcagggttctggatatctgttgagaatcgaaagattcttaataaggcatccttccgatgctgacttctcaccgtccgttttccaataggagcgggcggtatgtttt

SEQ ID NO: 1171 - RNA, 110 nt, synthetic construct
  source 1..110: mol_type = other RNA
  modified_base 1..3: mod_base = OTHER; note = 2'O-Methyl ribonucleotide
  modified_base 1..3: mod_base = OTHER; note = Phosphorothioate linkage
  modified_base 108..110: mod_base = OTHER; note = 2'O-Methyl ribonucleotide
  modified_base 107..109: mod_base = OTHER; note = Phosphorothioate linkage
tttttccttttagaaagttcctgttgagaatcgaaagattcttaataaggcatccttccgatgctgacttctcaccgtccgttttccaataggagcgggcggtatgtttt

SEQ ID NO: 1172 - RNA, 110 nt, synthetic construct
  source 1..110: mol_type = other RNA
  modified_base 1..3: mod_base = OTHER; note = 2'O-Methyl ribonucleotide
  modified_base 1..3: mod_base = OTHER; note = Phosphorothioate linkage
  modified_base 108..110: mod_base = OTHER; note = 2'O-Methyl ribonucleotide
  modified_base 107..109: mod_base = OTHER; note = Phosphorothioate linkage
cttttagaaagttcctgtgatggttgagaatcgaaagattcttaataaggcatccttccgatgctgacttctcaccgtccgttttccaataggagcgggcggtatgtttt

SEQ ID NO: 1173 - RNA, 110 nt, synthetic construct
  source 1..110: mol_type = other RNA
  modified_base 1..3: mod_base = OTHER; note = 2'O-Methyl ribonucleotide
  modified_base 1..3: mod_base = OTHER; note = Phosphorothioate linkage
  modified_base 108..110: mod_base = OTHER; note = 2'O-Methyl ribonucleotide
  modified_base 107..109: mod_base = OTHER; note = Phosphorothioate linkage
cctgtgatgtcaagctggtcgagttgagaatcgaaagattcttaataaggcatccttccgatgctgacttctcaccgtccgttttccaataggagcgggcggtatgtttt

SEQ ID NO: 1174 - RNA, 110 nt, synthetic construct
  source 1..110: mol_type = other RNA
  modified_base 1..3: mod_base = OTHER; note = 2'O-Methyl ribonucleotide
  modified_base 1..3: mod_base = OTHER; note = Phosphorothioate linkage
  modified_base 108..110: mod_base = OTHER; note = 2'O-Methyl ribonucleotide
  modified_base 107..109: mod_base = OTHER; note = Phosphorothioate linkage
ctgtgatgtcaagctggtcgaggttgagaatcgaaagattcttaataaggcatccttccgatgctgacttctcaccgtccgttttccaataggagcgggcggtatgtttt

SEQ ID NO: 1175 - RNA, 110 nt, synthetic construct
  source 1..110: mol_type = other RNA
  modified_base 1..3: mod_base = OTHER; note = 2'O-Methyl ribonucleotide
  modified_base 1..3: mod_base = OTHER; note = Phosphorothioate linkage
  modified_base 108..110: mod_base = OTHER; note = 2'O-Methyl ribonucleotide
  modified_base 107..109: mod_base = OTHER; note = Phosphorothioate linkage
tgtgatgtcaagctggtcgagagttgagaatcgaaagattcttaataaggcatccttccgatgctgacttctcaccgtccgttttccaataggagcgggcggtatgtttt

SEQ ID NO: 1176 - RNA, 110 nt, synthetic construct; identical to SEQ ID NO: 131
  source 1..110: mol_type = other RNA
  modified_base 1..3: mod_base = OTHER; note = 2'O-Methyl ribonucleotide
  modified_base 1..3: mod_base = OTHER; note = Phosphorothioate linkage
  modified_base 108..110: mod_base = OTHER; note = 2'O-Methyl ribonucleotide
  modified_base 107..109: mod_base = OTHER; note = Phosphorothioate linkage

SEQ ID NO: 1177 - RNA, 110 nt, synthetic construct
  source 1..110: mol_type = other RNA
  modified_base 1..3: mod_base = OTHER; note = 2'O-Methyl ribonucleotide
  modified_base 1..3: mod_base = OTHER; note = Phosphorothioate linkage
  modified_base 108..110: mod_base = OTHER; note = 2'O-Methyl ribonucleotide
  modified_base 107..109: mod_base = OTHER; note = Phosphorothioate linkage
gtcgagaaaagctttgaaacaggttgagaatcgaaagattcttaataaggcatccttccgatgctgacttctcaccgtccgttttccaataggagcgggcggtatgtttt

SEQ ID NO: 1178 - RNA, 110 nt, synthetic construct
  source 1..110: mol_type = other RNA
  modified_base 1..3: mod_base = OTHER; note = 2'O-Methyl ribonucleotide
  modified_base 1..3: mod_base = OTHER; note = Phosphorothioate linkage
  modified_base 108..110: mod_base = OTHER; note = 2'O-Methyl ribonucleotide
  modified_base 107..109: mod_base = OTHER; note = Phosphorothioate linkage
ctagacccctgtcttacctgttgttgagaatcgaaagattcttaataaggcatccttccgatgctgacttctcaccgtccgttttccaataggagcgggcggtatgtttt

SEQ ID NO: 1179 - RNA, 110 nt, synthetic construct
  source 1..110: mol_type = other RNA
  modified_base 1..3: mod_base = OTHER; note = 2'O-Methyl ribonucleotide
  modified_base 1..3: mod_base = OTHER; note = Phosphorothioate linkage
  modified_base 108..110: mod_base = OTHER; note = 2'O-Methyl ribonucleotide
  modified_base 107..109: mod_base = OTHER; note = Phosphorothioate linkage
tagacccctgtcttacctgtttgttgagaatcgaaagattcttaataaggcatccttccgatgctgacttctcaccgtccgttttccaataggagcgggcggtatgtttt

SEQ ID NO: 1180 - RNA, 110 nt, synthetic construct
  source 1..110: mol_type = other RNA
  modified_base 1..3: mod_base = OTHER; note = 2'O-Methyl ribonucleotide
  modified_base 1..3: mod_base = OTHER; note = Phosphorothioate linkage
  modified_base 108..110: mod_base = OTHER; note = 2'O-Methyl ribonucleotide
  modified_base 107..109: mod_base = OTHER; note = Phosphorothioate linkage
agacccctgtcttacctgtttcgttgagaatcgaaagattcttaataaggcatccttccgatgctgacttctcaccgtccgttttccaataggagcgggcggtatgtttt

SEQ ID NO: 1181 - RNA, 110 nt, synthetic construct
  source 1..110: mol_type = other RNA
  modified_base 1..3: mod_base = OTHER; note = 2'O-Methyl ribonucleotide
  modified_base 1..3: mod_base = OTHER; note = Phosphorothioate linkage
  modified_base 108..110: mod_base = OTHER; note = 2'O-Methyl ribonucleotide
  modified_base 107..109: mod_base = OTHER; note = Phosphorothioate linkage
cctgtttcaaagcttttctcgagttgagaatcgaaagattcttaataaggcatccttccgatgctgacttctcaccgtccgttttccaataggagcgggcggtatgtttt

SEQ ID NO: 1182 - RNA, 110 nt, synthetic construct; identical to SEQ ID NO: 986
  source 1..110: mol_type = other RNA
  modified_base 1..3: mod_base = OTHER; note = 2'O-Methyl ribonucleotide
  modified_base 1..3: mod_base = OTHER; note = Phosphorothioate linkage
  modified_base 108..110: mod_base = OTHER; note = 2'O-Methyl ribonucleotide
  modified_base 107..109: mod_base = OTHER; note = Phosphorothioate linkage

SEQ ID NO: 1183 - RNA, 110 nt, synthetic construct
  source 1..110: mol_type = other RNA
  modified_base 1..3: mod_base = OTHER; note = 2'O-Methyl ribonucleotide
  modified_base 1..3: mod_base = OTHER; note = Phosphorothioate linkage
  modified_base 108..110: mod_base = OTHER; note = 2'O-Methyl ribonucleotide
  modified_base 107..109: mod_base = OTHER; note = Phosphorothioate linkage
tttctcgaccagcttgacatcagttgagaatcgaaagattcttaataaggcatccttccgatgctgacttctcaccgtccgttttccaataggagcgggcggtatgtttt

SEQ ID NO: 1184 - DNA, 22 bp, Homo sapiens
  source 1..22: mol_type = genomic DNA
gatcctcttgtcccacagatat

SEQ ID NO: 1185 - DNA, 22 bp, Homo sapiens
  source 1..22: mol_type = genomic DNA
atcctcttgtcccacagatatc

SEQ ID NO: 1186 - DNA, 22 bp, Homo sapiens
  source 1..22: mol_type = genomic DNA
tcctcttgtcccacagatatcc

SEQ ID NO: 1187 - DNA, 22 bp, Homo sapiens
  source 1..22: mol_type = genomic DNA
tgtcccacagatatccagaacc

SEQ ID NO: 1188 - DNA, 22 bp, Homo sapiens
  source 1..22: mol_type = genomic DNA
ctgaccctgccgtgtaccagct

SEQ ID NO: 1189 - DNA, 22 bp, Homo sapiens
  source 1..22: mol_type = genomic DNA
tgaccctgccgtgtaccagctg

SEQ ID NO: 1190 - DNA, 22 bp, Homo sapiens
  source 1..22: mol_type = genomic DNA
gaccctgccgtgtaccagctga

SEQ ID NO: 1191 - DNA, 22 bp, Homo sapiens
  source 1..22: mol_type = genomic DNA
gccgtgtaccagctgagagact

SEQ ID NO: 1192 - DNA, 22 bp, Homo sapiens
  source 1..22: mol_type = genomic DNA
ccgtgtaccagctgagagactc

SEQ ID NO: 1193 - DNA, 22 bp, Homo sapiens
  source 1..22: mol_type = genomic DNA
ctgagagactctaaatccagtg

SEQ ID NO: 1194 - DNA, 22 bp, Homo sapiens
  source 1..22: mol_type = genomic DNA
tgagagactctaaatccagtga

SEQ ID NO: 1195 - DNA, 22 bp, Homo sapiens
  source 1..22: mol_type = genomic DNA
gacaagtctgtctgcctattca

SEQ ID NO: 1196 - DNA, 22 bp, Homo sapiens
  source 1..22: mol_type = genomic DNA
tctgtctgcctattcaccgatt

SEQ ID NO: 1197 - DNA, 22 bp, Homo sapiens
  source 1..22: mol_type = genomic DNA
ttcaccgattttgattctcaaa

SEQ ID NO: 1198 - DNA, 22 bp, Homo sapiens
  source 1..22: mol_type = genomic DNA
ttgattctcaaacaaatgtgtc

SEQ ID NO: 1199 - DNA, 22 bp, Homo sapiens
  source 1..22: mol_type = genomic DNA
ctcaaacaaatgtgtcacaaag

SEQ ID NO: 1200 - DNA, 22 bp, Homo sapiens
  source 1..22: mol_type = genomic DNA
tcaaacaaatgtgtcacaaagt

SEQ ID NO: 1201 - DNA, 22 bp, Homo sapiens
  source 1..22: mol_type = genomic DNA
caaacaaatgtgtcacaaagta

SEQ ID NO: 1202 - DNA, 22 bp, Homo sapiens
  source 1..22: mol_type = genomic DNA
aatgtgtcacaaagtaaggatt

SEQ ID NO: 1203 - DNA, 22 bp, Homo sapiens
  source 1..22: mol_type = genomic DNA
gattctgatgtgtatatcacag

SEQ ID NO: 1204 - DNA, 22 bp, Homo sapiens
  source 1..22: mol_type = genomic DNA
attctgatgtgtatatcacaga

SEQ ID NO: 1205 - DNA, 22 bp, Homo sapiens
  source 1..22: mol_type = genomic DNA
tatatcacagacaaaactgtgc

SEQ ID NO: 1206 - DNA, 22 bp, Homo sapiens
  source 1..22: mol_type = genomic DNA
cacagacaaaactgtgctagac

SEQ ID NO: 1207 - DNA, 22 bp, Homo sapiens
  source 1..22: mol_type = genomic DNA
acagacaaaactgtgctagaca

SEQ ID NO: 1208 - DNA, 22 bp, Homo sapiens
  source 1..22: mol_type = genomic DNA
cagacaaaactgtgctagacat

SEQ ID NO: 1209 - DNA, 22 bp, Homo sapiens
  source 1..22: mol_type = genomic DNA
aactgtgctagacatgaggtct

SEQ ID NO: 1210 - DNA, 22 bp, Homo sapiens
  source 1..22: mol_type = genomic DNA
actgtgctagacatgaggtcta

SEQ ID NO: 1211 - DNA, 22 bp, Homo sapiens
  source 1..22: mol_type = genomic DNA
tagacatgaggtctatggactt

SEQ ID NO: 1212 - DNA, 22 bp, Homo sapiens
  source 1..22: mol_type = genomic DNA
aggtctatggacttcaagagca

SEQ ID NO: 1213 - DNA, 22 bp, Homo sapiens
  source 1..22: mol_type = genomic DNA
ggacttcaagagcaacagtgct

SEQ ID NO: 1214 - DNA, 22 bp, Homo sapiens
  source 1..22: mol_type = genomic DNA
tcaagagcaacagtgctgtggc

SEQ ID NO: 1215 - DNA, 22 bp, Homo sapiens
  source 1..22: mol_type = genomic DNA
aacagtgctgtggcctggagca

SEQ ID NO: 1216 - DNA, 22 bp, Homo sapiens
  source 1..22: mol_type = genomic DNA
acagtgctgtggcctggagcaa

SEQ ID NO: 1217 - DNA, 22 bp, Homo sapiens
  source 1..22: mol_type = genomic DNA
gctgtggcctggagcaacaaat

SEQ ID NO: 1218 - DNA, 22 bp, Homo sapiens
  source 1..22: mol_type = genomic DNA
aacaaatctgactttgcatgtg

SEQ ID NO: 1219 - DNA, 22 bp, Homo sapiens
  source 1..22: mol_type = genomic DNA
gcatgtgcaaacgccttcaaca

SEQ ID NO: 1220 - DNA, 22 bp, Homo sapiens
  source 1..22: mol_type = genomic DNA
ccttcaacaacagcattattcc

SEQ ID NO: 1221 - DNA, 22 bp, Homo sapiens
  source 1..22: mol_type = genomic DNA
ttcaacaacagcattattccag

SEQ ID NO: 1222 - DNA, 22 bp, Homo sapiens
  source 1..22: mol_type = genomic DNA
attccagaagacaccttcttcc

SEQ ID NO: 1223 - DNA, 22 bp, Homo sapiens
  source 1..22: mol_type = genomic DNA
acaccttcttccccagcccagg

SEQ ID NO: 1224 - DNA, 22 bp, Homo sapiens
  source 1..22: mol_type = genomic DNA
ctgcccttacctgggctgggga

SEQ ID NO: 1225 - DNA, 22 bp, Homo sapiens
  source 1..22: mol_type = genomic DNA
gcccttacctgggctggggaag

SEQ ID NO: 1226 - DNA, 22 bp, Homo sapiens
  source 1..22: mol_type = genomic DNA
gggctggggaagaaggtgtctt

SEQ ID NO: 1227 - DNA, 22 bp, Homo sapiens
  source 1..22: mol_type = genomic DNA
ggggaagaaggtgtcttctgga

SEQ ID NO: 1228 - DNA, 22 bp, Homo sapiens
  source 1..22: mol_type = genomic DNA
tcttctggaataatgctgttgt

SEQ ID NO: 1229 - DNA, 22 bp, Homo sapiens
  source 1..22: mol_type = genomic DNA
ttctggaataatgctgttgttg

SEQ ID NO: 1230 - DNA, 22 bp, Homo sapiens
  source 1..22: mol_type = genomic DNA
gttgttgaaggcgtttgcacat

SEQ ID NO: 1231 - DNA, 22 bp, Homo sapiens
  source 1..22: mol_type = genomic DNA
ttgttgaaggcgtttgcacatg

SEQ ID NO: 1232 - DNA, 22 bp, Homo sapiens
  source 1..22: mol_type = genomic DNA
gaaggcgtttgcacatgcaaag

SEQ ID NO: 1233 - DNA, 22 bp, Homo sapiens
  source 1..22: mol_type = genomic DNA
aaggcgtttgcacatgcaaagt

SEQ ID NO: 1234 - DNA, 22 bp, Homo sapiens
  source 1..22: mol_type = genomic DNA
atgcaaagtcagatttgttgct

SEQ ID NO: 1235 - DNA, 22 bp, Homo sapiens
  source 1..22: mol_type = genomic DNA
gtcagatttgttgctccaggcc

SEQ ID NO: 1236 - DNA, 22 bp, Homo sapiens
  source 1..22: mol_type = genomic DNA
ccaggccacagcactgttgctc

SEQ ID NO: 1237 - DNA, 22 bp, Homo sapiens
  source 1..22: mol_type = genomic DNA
caggccacagcactgttgctct

SEQ ID NO: 1238 - DNA, 22 bp, Homo sapiens
  source 1..22: mol_type = genomic DNA
aggccacagcactgttgctctt

SEQ ID NO: 1239 - DNA, 22 bp, Homo sapiens
  source 1..22: mol_type = genomic DNA
agcactgttgctcttgaagtcc

SEQ ID NO: 1240 - DNA, 22 bp, Homo sapiens
  source 1..22: mol_type = genomic DNA
gcactgttgctcttgaagtcca

SEQ ID NO: 1241 - DNA, 22 bp, Homo sapiens
  source 1..22: mol_type = genomic DNA
ttgaagtccatagacctcatgt

SEQ ID NO: 1242 - DNA, 22 bp, Homo sapiens
  source 1..22: mol_type = genomic DNA
gtccatagacctcatgtctagc

SEQ ID NO: 1243 - DNA, 22 bp, Homo sapiens
  source 1..22: mol_type = genomic DNA
catgtctagcacagttttgtct

SEQ ID NO: 1244 - DNA, 22 bp, Homo sapiens
  source 1..22: mol_type = genomic DNA
agttttgtctgtgatatacaca

SEQ ID NO: 1245 - DNA, 22 bp, Homo sapiens
  source 1..22: mol_type = genomic DNA
gttttgtctgtgatatacacat

SEQ ID NO: 1246 - DNA, 22 bp, Homo sapiens
  source 1..22: mol_type = genomic DNA
ttttgtctgtgatatacacatc

SEQ ID NO: 1247 - DNA, 22 bp, Homo sapiens
  source 1..22: mol_type = genomic DNA
tacacatcagaatccttacttt

SEQ ID NO: 1248 - DNA, 22 bp, Homo sapiens
  source 1..22: mol_type = genomic DNA
cttactttgtgacacatttgtt

SEQ ID NO: 1249 - DNA, 22 bp, Homo sapiens
  source 1..22: mol_type = genomic DNA
ttactttgtgacacatttgttt

SEQ ID NO: 1250 - DNA, 22 bp, Homo sapiens
  source 1..22: mol_type = genomic DNA
ttgtgacacatttgtttgagaa

SEQ ID NO: 1251 - DNA, 22 bp, Homo sapiens
  source 1..22: mol_type = genomic DNA
tgtgacacatttgtttgagaat

SEQ ID NO: 1252 - DNA, 22 bp, Homo sapiens
  source 1..22: mol_type = genomic DNA
atcaaaatcggtgaataggcag

SEQ ID NO: 1253 - DNA, 22 bp, Homo sapiens
  source 1..22: mol_type = genomic DNA
tcaaaatcggtgaataggcaga

SEQ ID NO: 1254 - DNA, 22 bp, Homo sapiens
  source 1..22: mol_type = genomic DNA
gaataggcagacagacttgtca

SEQ ID NO: 1255 - DNA, 22 bp, Homo sapiens
  source 1..22: mol_type = genomic DNA
aataggcagacagacttgtcac

SEQ ID NO: 1256 - DNA, 22 bp, Homo sapiens
  source 1..22: mol_type = genomic DNA
gcagacagacttgtcactggat

SEQ ID NO: 1257 - DNA, 22 bp, Homo sapiens
  source 1..22: mol_type = genomic DNA
cagacagacttgtcactggatt

SEQ ID NO: 1258 - DNA, 22 bp, Homo sapiens
  source 1..22: mol_type = genomic DNA
agacagacttgtcactggattt

SEQ ID NO: 1259 - DNA, 22 bp, Homo sapiens
  source 1..22: mol_type = genomic DNA
cactggatttagagtctctcag

SEQ ID NO: 1260 - DNA, 22 bp, Homo sapiens
  source 1..22: mol_type = genomic DNA
agagtctctcagctggtacacg

SEQ ID NO: 1261 - DNA, 22 bp, Homo sapiens
  source 1..22: mol_type = genomic DNA
gagtctctcagctggtacacgg

SEQ ID NO: 1262 - DNA, 22 bp, Homo sapiens
  source 1..22: mol_type = genomic DNA
tctcagctggtacacggcaggg

SEQ ID NO: 1263 - DNA, 22 bp, Homo sapiens
  source 1..22: mol_type = genomic DNA
ctcagctggtacacggcagggt

SEQ ID NO: 1264 - DNA, 22 bp, Homo sapiens
  source 1..22: mol_type = genomic DNA
tcagctggtacacggcagggtc

SEQ ID NO: 1265 - DNA, 22 bp, Homo sapiens
  source 1..22: mol_type = genomic DNA
gtacacggcagggtcagggttc

SEQ ID NO: 1266 - DNA, 22 bp, Homo sapiens
  source 1..22: mol_type = genomic DNA
agggtcagggttctggatatct

SEQ ID NO: 1267 - DNA, 22 bp, Homo sapiens
  source 1..22: mol_type = genomic DNA
tttttccttttagaaagttcct

SEQ ID NO: 1268 - DNA, 22 bp, Homo sapiens
  source 1..22: mol_type = genomic DNA
cttttagaaagttcctgtgatg

SEQ ID NO: 1269 - DNA, 22 bp, Homo sapiens
  source 1..22: mol_type = genomic DNA
cctgtgatgtcaagctggtcga

SEQ ID NO: 1270 - DNA, 22 bp, Homo sapiens
  source 1..22: mol_type = genomic DNA
ctgtgatgtcaagctggtcgag

SEQ ID NO: 1271 - DNA, 22 bp, Homo sapiens
  source 1..22: mol_type = genomic DNA
tgtgatgtcaagctggtcgaga

SEQ ID NO: 1272 - DNA, 22 bp, Homo sapiens
  source 1..22: mol_type = genomic DNA
gtcaagctggtcgagaaaagct

SEQ ID NO: 1273 - DNA, 22 bp, Homo sapiens
  source 1..22: mol_type = genomic DNA
gtcgagaaaagctttgaaacag

SEQ ID NO: 1274 - DNA, 22 bp, Homo sapiens
  source 1..22: mol_type = genomic DNA
ctagacccctgtcttacctgtt

SEQ ID NO: 1275 - DNA, 22 bp, Homo sapiens
  source 1..22: mol_type = genomic DNA
tagacccctgtcttacctgttt

SEQ ID NO: 1276 - DNA, 22 bp, Homo sapiens
  source 1..22: mol_type = genomic DNA
agacccctgtcttacctgtttc

SEQ ID NO: 1277 - DNA, 22 bp, Homo sapiens
  source 1..22: mol_type = genomic DNA
cctgtttcaaagcttttctcga

SEQ ID NO: 1278 - DNA, 22 bp, Homo sapiens
  source 1..22: mol_type = genomic DNA
ttcaaagcttttctcgaccagc

SEQ ID NO: 1279 - DNA, 22 bp, Homo sapiens
  source 1..22: mol_type = genomic DNA
tttctcgaccagcttgacatca

SEQ ID NO: 1280 - RNA, 110 nt, synthetic construct
  source 1..110: mol_type = other RNA
  modified_base 1..3: mod_base = OTHER; note = 2'O-Methyl ribonucleotide
  modified_base 1..3: mod_base = OTHER; note = Phosphorothioate linkage
  modified_base 108..110: mod_base = OTHER; note = 2'O-Methyl ribonucleotide
  modified_base 107..109: mod_base = OTHER; note = Phosphorothioate linkage
ttctcgaccagcttgacatcacgttgagaatcgaaagattcttaataaggcatccttccgatgctgacttctcaccgtccgttttccaataggagcgggcggtatgtttt

SEQ ID NO: 1281 - RNA, 110 nt, synthetic construct
  source 1..110: mol_type = other RNA
  modified_base 1..3: mod_base = OTHER; note = 2'O-Methyl ribonucleotide
  modified_base 1..3: mod_base = OTHER; note = Phosphorothioate linkage
  modified_base 108..110: mod_base = OTHER; note = 2'O-Methyl ribonucleotide
  modified_base 107..109: mod_base = OTHER; note = Phosphorothioate linkage
tctcgaccagcttgacatcacagttgagaatcgaaagattcttaataaggcatccttccgatgctgacttctcaccgtccgttttccaataggagcgggcggtatgtttt

SEQ ID NO: 1282 - RNA, 110 nt, synthetic construct
  source 1..110: mol_type = other RNA
  modified_base 1..3: mod_base = OTHER; note = 2'O-Methyl ribonucleotide
  modified_base 1..3: mod_base = OTHER; note = Phosphorothioate linkage
  modified_base 108..110: mod_base = OTHER; note = 2'O-Methyl ribonucleotide
  modified_base 107..109: mod_base = OTHER; note = Phosphorothioate linkage
tcttggttttacagatacgaacgttgagaatcgaaagattcttaataaggcatccttccgatgctgacttctcaccgtccgttttccaataggagcgggcggtatgtttt

SEQ ID NO: 1283 - RNA, 110 nt, synthetic construct
  source 1..110: mol_type = other RNA
  modified_base 1..3: mod_base = OTHER; note = 2'O-Methyl ribonucleotide
  modified_base 1..3: mod_base = OTHER; note = Phosphorothioate linkage
  modified_base 108..110: mod_base = OTHER; note = 2'O-Methyl ribonucleotide
  modified_base 107..109: mod_base = OTHER; note = Phosphorothioate linkage
cttggttttacagatacgaaccgttgagaatcgaaagattcttaataaggcatccttccgatgctgacttctcaccgtccgttttccaataggagcgggcggtatgtttt

SEQ ID NO: 1284 - RNA, 110 nt, synthetic construct; identical to SEQ ID NO: 134
  source 1..110: mol_type = other RNA
  modified_base 1..3: mod_base = OTHER; note = 2'O-Methyl ribonucleotide
  modified_base 1..3: mod_base = OTHER; note = Phosphorothioate linkage
  modified_base 108..110: mod_base = OTHER; note = 2'O-Methyl ribonucleotide
  modified_base 107..109: mod_base = OTHER; note = Phosphorothioate linkage

SEQ ID NO: 1285 - RNA, 110 nt, synthetic construct
  source 1..110: mol_type = other RNA
  modified_base 1..3: mod_base = OTHER; note = 2'O-Methyl ribonucleotide
  modified_base 1..3: mod_base = OTHER; note = Phosphorothioate linkage
  modified_base 108..110: mod_base = OTHER; note = 2'O-Methyl ribonucleotide
  modified_base 107..109: mod_base = OTHER; note = Phosphorothioate linkage
tacagatacgaacctaaactttgttgagaatcgaaagattcttaataaggcatccttccgatgctgacttctcaccgtccgttttccaataggagcgggcggtatgtttt

SEQ ID NO: 1286 - RNA, 110 nt, synthetic construct
  source 1..110: mol_type = other RNA
  modified_base 1..3: mod_base = OTHER; note = 2'O-Methyl ribonucleotide
  modified_base 1..3: mod_base = OTHER; note = Phosphorothioate linkage
  modified_base 108..110: mod_base = OTHER; note = 2'O-Methyl ribonucleotide
  modified_base 107..109: mod_base = OTHER; note = Phosphorothioate linkage
acagatacgaacctaaactttcgttgagaatcgaaagattcttaataaggcatccttccgatgctgacttctcaccgtccgttttccaataggagcgggcggtatgtttt

SEQ ID NO: 1287 - RNA, 110 nt, synthetic construct
  source 1..110: mol_type = other RNA
  modified_base 1..3: mod_base = OTHER; note = 2'O-Methyl ribonucleotide
  modified_base 1..3: mod_base = OTHER; note = Phosphorothioate linkage
  modified_base 108..110: mod_base = OTHER; note = 2'O-Methyl ribonucleotide
  modified_base 107..109: mod_base = OTHER; note = Phosphorothioate linkage
aactttcaaaacctgtcagtgagttgagaatcgaaagattcttaataaggcatccttccgatgctgacttctcaccgtccgttttccaataggagcgggcggtatgtttt

SEQ ID NO: 1288 - RNA, 110 nt, synthetic construct
  source 1..110: mol_type = other RNA
  modified_base 1..3: mod_base = OTHER; note = 2'O-Methyl ribonucleotide
  modified_base 1..3: mod_base = OTHER; note = Phosphorothioate linkage
  modified_base 108..110: mod_base = OTHER; note = 2'O-Methyl ribonucleotide
  modified_base 107..109: mod_base = OTHER; note = Phosphorothioate linkage
actttcaaaacctgtcagtgatgttgagaatcgaaagattcttaataaggcatccttccgatgctgacttctcaccgtccgttttccaataggagcgggcggtatgtttt

SEQ ID NO: 1289 - RNA, 110 nt, synthetic construct; identical to SEQ ID NO: 135
  source 1..110: mol_type = other RNA
  modified_base 1..3: mod_base = OTHER; note = 2'O-Methyl ribonucleotide
  modified_base 1..3: mod_base = OTHER; note = Phosphorothioate linkage
  modified_base 108..110: mod_base = OTHER; note = 2'O-Methyl ribonucleotide
  modified_base 107..109: mod_base = OTHER; note = Phosphorothioate linkage

SEQ ID NO: 1290 - RNA, 110 nt, synthetic construct
  source 1..110: mol_type = other RNA
  modified_base 1..3: mod_base = OTHER; note = 2'O-Methyl ribonucleotide
  modified_base 1..3: mod_base = OTHER; note = Phosphorothioate linkage
  modified_base 108..110: mod_base = OTHER; note = 2'O-Methyl ribonucleotide
  modified_base 107..109: mod_base = OTHER; note = Phosphorothioate linkage
aaacctgtcagtgattgggttcgttgagaatcgaaagattcttaataaggcatccttccgatgctgacttctcaccgtccgttttccaataggagcgggcggtatgtttt

SEQ ID NO: 1291 - RNA, 110 nt, synthetic construct
  source 1..110: mol_type = other RNA
  modified_base 1..3: mod_base = OTHER; note = 2'O-Methyl ribonucleotide
  modified_base 1..3: mod_base = OTHER; note = Phosphorothioate linkage
  modified_base 108..110: mod_base = OTHER; note = 2'O-Methyl ribonucleotide
  modified_base 107..109: mod_base = OTHER; note = Phosphorothioate linkage
attgggttccgaatcctcctccgttgagaatcgaaagattcttaataaggcatccttccgatgctgacttctcaccgtccgttttccaataggagcgggcggtatgtttt

SEQ ID NO: 1292 - RNA, 110 nt, synthetic construct
  source 1..110: mol_type = other RNA
  modified_base 1..3: mod_base = OTHER; note = 2'O-Methyl ribonucleotide
  modified_base 1..3: mod_base = OTHER; note = Phosphorothioate linkage
  modified_base 108..110: mod_base = OTHER; note = 2'O-Methyl ribonucleotide
  modified_base 107..109: mod_base = OTHER; note = Phosphorothioate linkage
cgaatcctcctcctgaaagtgggttgagaatcgaaagattcttaataaggcatccttccgatgctgacttctcaccgtccgttttccaataggagcgggcggtatgtttt

SEQ ID NO: 1293 - RNA, 110 nt, synthetic construct
  source 1..110: mol_type = other RNA
  modified_base 1..3: mod_base = OTHER; note = 2'O-Methyl ribonucleotide
  modified_base 1..3: mod_base = OTHER; note = Phosphorothioate linkage
  modified_base 108..110: mod_base = OTHER; note = 2'O-Methyl ribonucleotide
  modified_base 107..109: mod_base = OTHER; note = Phosphorothioate linkage
gaatcctcctcctgaaagtggcgttgagaatcgaaagattcttaataaggcatccttccgatgctgacttctcaccgtccgttttccaataggagcgggcggtatgtttt

SEQ ID NO: 1294 - RNA, 110 nt, synthetic construct
  source 1..110: mol_type = other RNA
  modified_base 1..3: mod_base = OTHER; note = 2'O-Methyl ribonucleotide
  modified_base 1..3: mod_base = OTHER; note = Phosphorothioate linkage
  modified_base 108..110: mod_base = OTHER; note = 2'O-Methyl ribonucleotide
  modified_base 107..109: mod_base = OTHER; note = Phosphorothioate linkage
ctcctcctgaaagtggccgggtgttgagaatcgaaagattcttaataaggcatccttccgatgctgacttctcaccgtccgttttccaataggagcgggcggtatgtttt

SEQ ID NO: 1295 - RNA, 110 nt, synthetic construct
  source 1..110: mol_type = other RNA
  modified_base 1..3: mod_base = OTHER; note = 2'O-Methyl ribonucleotide
  modified_base 1..3: mod_base = OTHER; note = Phosphorothioate linkage
  modified_base 108..110: mod_base = OTHER; note = 2'O-Methyl ribonucleotide
  modified_base 107..109: mod_base = OTHER; note = Phosphorothioate linkage
agtggccgggtttaatctgctcgttgagaatcgaaagattcttaataaggcatccttccgatgctgacttctcaccgtccgttttccaataggagcgggcggtatgtttt

SEQ ID NO: 1296 - RNA, 110 nt, synthetic construct
  source 1..110: mol_type = other RNA
  modified_base 1..3: mod_base = OTHER; note = 2'O-Methyl ribonucleotide
  modified_base 1..3: mod_base = OTHER; note = Phosphorothioate linkage
  modified_base 108..110: mod_base = OTHER; note = 2'O-Methyl ribonucleotide
  modified_base 107..109: mod_base = OTHER; note = Phosphorothioate linkage
atctgctcatgacgctgcggctgttgagaatcgaaagattcttaataaggcatccttccgatgctgacttctcaccgtccgttttccaataggagcgggcggtatgtttt

SEQ ID NO: 1297 - RNA, 110 nt, synthetic construct
  source 1..110: mol_type = other RNA
  modified_base 1..3: mod_base = OTHER; note = 2'O-Methyl ribonucleotide
  modified_base 1..3: mod_base = OTHER; note = Phosphorothioate linkage
  modified_base 108..110: mod_base = OTHER; note = 2'O-Methyl ribonucleotide
  modified_base 107..109: mod_base = OTHER; note = Phosphorothioate linkage
tgacgctgcggctgtggtccaggttgagaatcgaaagattcttaataaggcatccttccgatgctgacttctcaccgtccgttttccaataggagcgggcggtatgtttt

SEQ ID NO: 1298 - RNA, 110 nt, synthetic construct
  source 1..110: mol_type = other RNA
  modified_base 1..3: mod_base = OTHER; note = 2'O-Methyl ribonucleotide
  modified_base 1..3: mod_base = OTHER; note = Phosphorothioate linkage
  modified_base 108..110: mod_base = OTHER; note = 2'O-Methyl ribonucleotide
  modified_base 107..109: mod_base = OTHER; note = Phosphorothioate linkage
gcggctgtggtccagctgaggtgttgagaatcgaaagattcttaataaggcatccttccgatgctgacttctcaccgtccgttttccaataggagcgggcggtatgtttt

SEQ ID NO: 1299 - RNA, 110 nt, synthetic construct
  source 1..110: mol_type = other RNA
  modified_base 1..3: mod_base = OTHER; note = 2'O-Methyl ribonucleotide
  modified_base 1..3: mod_base = OTHER; note = Phosphorothioate linkage
  modified_base 108..110: mod_base = OTHER; note = 2'O-Methyl ribonucleotide
  modified_base 107..109: mod_base = OTHER; note = Phosphorothioate linkage
cggctgtggtccagctgaggtggttgagaatcgaaagattcttaataaggcatccttccgatgctgacttctcaccgtccgttttccaataggagcgggcggtatgtttt

SEQ ID NO: 1300 - RNA, 110 nt, synthetic construct
  source 1..110: mol_type = other RNA
  modified_base 1..3: mod_base = OTHER; note = 2'O-Methyl ribonucleotide
  modified_base 1..3: mod_base = OTHER; note = Phosphorothioate linkage
  modified_base 108..110: mod_base = OTHER; note = 2'O-Methyl ribonucleotide
  modified_base 107..109: mod_base = OTHER; note = Phosphorothioate linkage
ggctgtggtccagctgaggtgagttgagaatcgaaagattcttaataaggcatccttccgatgctgacttctcaccgtccgttttccaataggagcgggcggtatgtttt

SEQ ID NO: 1301 - RNA, 110 nt, synthetic construct
  source 1..110: mol_type = other RNA
  modified_base 1..3: mod_base = OTHER; note = 2'O-Methyl ribonucleotide
  modified_base 1..3: mod_base = OTHER; note = Phosphorothioate linkage
  modified_base 108..110: mod_base = OTHER; note = 2'O-Methyl ribonucleotide
  modified_base 107..109: mod_base = OTHER; note = Phosphorothioate linkage
gcttcaaggcccctcacctcaggttgagaatcgaaagattcttaataaggcatccttccgatgctgacttctcaccgtccgttttccaataggagcgggcggtatgtttt

SEQ ID NO: 1302 - RNA, 110 nt, synthetic construct
  source 1..110: mol_type = other RNA
  modified_base 1..3: mod_base = OTHER; note = 2'O-Methyl ribonucleotide
  modified_base 1..3: mod_base = OTHER; note = Phosphorothioate linkage
  modified_base 108..110: mod_base = OTHER; note = 2'O-Methyl ribonucleotide
  modified_base 107..109: mod_base = OTHER; note = Phosphorothioate linkage
tcacctcagctggaccacagccgttgagaatcgaaagattcttaataaggcatccttccgatgctgacttctcaccgtccgttttccaataggagcgggcggtatgtttt

SEQ ID NO: 1303 - RNA, 110 nt, synthetic construct
  source 1..110: mol_type = other RNA
  modified_base 1..3: mod_base = OTHER; note = 2'O-Methyl ribonucleotide
  modified_base 1..3: mod_base = OTHER; note = Phosphorothioate linkage
  modified_base 108..110: mod_base = OTHER; note = 2'O-Methyl ribonucleotide
  modified_base 107..109: mod_base = OTHER; note = Phosphorothioate linkage
gaccacagccgcagcgtcatgagttgagaatcgaaagattcttaataaggcatccttccgatgctgacttctcaccgtccgttttccaataggagcgggcggtatgtttt

SEQ ID NO: 1304 - RNA, 110 nt, synthetic construct
  source 1..110: mol_type = other RNA
  modified_base 1..3: mod_base = OTHER; note = 2'O-Methyl ribonucleotide
  modified_base 1..3: mod_base = OTHER; note = Phosphorothioate linkage
  modified_base 108..110: mod_base = OTHER; note = 2'O-Methyl ribonucleotide
  modified_base 107..109: mod_base = OTHER; note = Phosphorothioate linkage
cagccgcagcgtcatgagcagagttgagaatcgaaagattcttaataaggcatccttccgatgctgacttctcaccgtccgttttccaataggagcgggcggtatgtttt

SEQ ID NO: 1305 - RNA, 110 nt, synthetic construct
  source 1..110: mol_type = other RNA
  modified_base 1..3: mod_base = OTHER; note = 2'O-Methyl ribonucleotide
  modified_base 1..3: mod_base = OTHER; note = Phosphorothioate linkage
  modified_base 108..110: mod_base = OTHER; note = 2'O-Methyl ribonucleotide
  modified_base 107..109: mod_base = OTHER; note = Phosphorothioate linkage
agccgcagcgtcatgagcagatgttgagaatcgaaagattcttaataaggcatccttccgatgctgacttctcaccgtccgttttccaataggagcgggcggtatgtttt

SEQ ID NO: 1306 - RNA, 110 nt, synthetic construct
  source 1..110: mol_type = other RNA
  modified_base 1..3: mod_base = OTHER; note = 2'O-Methyl ribonucleotide
  modified_base 1..3: mod_base = OTHER; note = Phosphorothioate linkage
  modified_base 108..110: mod_base = OTHER; note = 2'O-Methyl ribonucleotide
  modified_base 107..109: mod_base = OTHER; note = Phosphorothioate linkage
ttaaacccggccactttcaggagttgagaatcgaaagattcttaataaggcatccttccgatgctgacttctcaccgtccgttttccaataggagcgggcggtatgtttt

SEQ ID NO: 1307 - RNA, 110 nt, synthetic construct
  source 1..110: mol_type = other RNA
  modified_base 1..3: mod_base = OTHER; note = 2'O-Methyl ribonucleotide
  modified_base 1..3: mod_base = OTHER; note = Phosphorothioate linkage
  modified_base 108..110: mod_base = OTHER; note = 2'O-Methyl ribonucleotide
  modified_base 107..109: mod_base = OTHER; note = Phosphorothioate linkage
taaacccggccactttcaggaggttgagaatcgaaagattcttaataaggcatccttccgatgctgacttctcaccgtccgttttccaataggagcgggcggtatgtttt

SEQ ID NO: 1308 - RNA, 110 nt, synthetic construct
  source 1..110: mol_type = other RNA
  modified_base 1..3: mod_base = OTHER; note = 2'O-Methyl ribonucleotide
  modified_base 1..3: mod_base = OTHER; note = Phosphorothioate linkage
  modified_base 108..110: mod_base = OTHER; note = 2'O-Methyl ribonucleotide
  modified_base 107..109: mod_base = OTHER; note = Phosphorothioate linkage
aaacccggccactttcaggagggttgagaatcgaaagattcttaataaggcatccttccgatgctgacttctcaccgtccgttttccaataggagcgggcggtatgtttt

SEQ ID NO: 1309 - RNA, 110 nt, synthetic construct
  source 1..110: mol_type = other RNA
  modified_base 1..3: mod_base = OTHER; note = 2'O-Methyl ribonucleotide
  modified_base 1..3: mod_base = OTHER; note = Phosphorothioate linkage
  modified_base 108..110: mod_base = OTHER; note = 2'O-Methyl ribonucleotide
  modified_base 107..109: mod_base = OTHER; note = Phosphorothioate linkage
cggccactttcaggaggaggatgttgagaatcgaaagattcttaataaggcatccttccgatgctgacttctcaccgtccgttttccaataggagcgggcggtatgtttt

SEQ ID NO: 1310 - RNA, 110 nt, synthetic construct
  source 1..110: mol_type = other RNA
  modified_base 1..3: mod_base = OTHER; note = 2'O-Methyl ribonucleotide
  modified_base 1..3: mod_base = OTHER; note = Phosphorothioate linkage
  modified_base 108..110: mod_base = OTHER; note = 2'O-Methyl ribonucleotide
  modified_base 107..109: mod_base = OTHER; note = Phosphorothioate linkage
ggccactttcaggaggaggattgttgagaatcgaaagattcttaataaggcatccttccgatgctgacttctcaccgtccgttttccaataggagcgggcggtatgtttt

SEQ ID NO: 1311 - RNA, 110 nt, synthetic construct
  source 1..110: mol_type = other RNA
  modified_base 1..3: mod_base = OTHER; note = 2'O-Methyl ribonucleotide
  modified_base 1..3: mod_base = OTHER; note = Phosphorothioate linkage
  modified_base 108..110: mod_base = OTHER; note = 2'O-Methyl ribonucleotide
  modified_base 107..109: mod_base = OTHER; note = Phosphorothioate linkage
gccactttcaggaggaggattcgttgagaatcgaaagattcttaataaggcatccttccgatgctgacttctcaccgtccgttttccaataggagcgggcggtatgtttt

SEQ ID NO: 1312 - RNA, 110 nt, synthetic construct
  source 1..110: mol_type = other RNA
  modified_base 1..3: mod_base = OTHER; note = 2'O-Methyl ribonucleotide
  modified_base 1..3: mod_base = OTHER; note = Phosphorothioate linkage
  modified_base 108..110: mod_base = OTHER; note = 2'O-Methyl ribonucleotide
  modified_base 107..109: mod_base = OTHER; note = Phosphorothioate linkage
aggattcggaacccaatcactggttgagaatcgaaagattcttaataaggcatccttccgatgctgacttctcaccgtccgttttccaataggagcgggcggtatgtttt

SEQ ID NO: 1313 - RNA, 110 nt, synthetic construct
  source 1..110: mol_type = other RNA
  modified_base 1..3: mod_base = OTHER; note = 2'O-Methyl ribonucleotide
  modified_base 1..3: mod_base = OTHER; note = Phosphorothioate linkage
  modified_base 108..110: mod_base = OTHER; note = 2'O-Methyl ribonucleotide
  modified_base 107..109: mod_base = OTHER; note = Phosphorothioate linkage
ggattcggaacccaatcactgagttgagaatcgaaagattcttaataaggcatccttccgatgctgacttctcaccgtccgttttccaataggagcgggcggtatgtttt

SEQ ID NO: 1314 - RNA, 110 nt, synthetic construct
  source 1..110: mol_type = other RNA
  modified_base 1..3: mod_base = OTHER; note = 2'O-Methyl ribonucleotide
  modified_base 1..3: mod_base = OTHER; note = Phosphorothioate linkage
  modified_base 108..110: mod_base = OTHER; note = 2'O-Methyl ribonucleotide
  modified_base 107..109: mod_base = OTHER; note = Phosphorothioate linkage
gaacccaatcactgacaggtttgttgagaatcgaaagattcttaataaggcatccttccgatgctgacttctcaccgtccgttttccaataggagcgggcggtatgtttt

SEQ ID NO: 1315 - RNA, 110 nt, synthetic construct
  source 1..110: mol_type = other RNA
  modified_base 1..3: mod_base = OTHER; note = 2'O-Methyl ribonucleotide
  modified_base 1..3: mod_base = OTHER; note = Phosphorothioate linkage
  modified_base 108..110: mod_base = OTHER; note = 2'O-Methyl ribonucleotide
  modified_base 107..109: mod_base = OTHER; note = Phosphorothioate linkage
aacccaatcactgacaggttttgttgagaatcgaaagattcttaataaggcatccttccgatgctgacttctcaccgtccgttttccaataggagcgggcggtatgtttt

SEQ ID NO: 1316 - RNA, 110 nt, synthetic construct
  source 1..110: mol_type = other RNA
  modified_base 1..3: mod_base = OTHER; note = 2'O-Methyl ribonucleotide
  modified_base 1..3: mod_base = OTHER; note = Phosphorothioate linkage
  modified_base 108..110: mod_base = OTHER; note = 2'O-Methyl ribonucleotide
  modified_base 107..109: mod_base = OTHER; note = Phosphorothioate linkage
acccaatcactgacaggttttggttgagaatcgaaagattcttaataaggcatccttccgatgctgacttctcaccgtccgttttccaataggagcgggcggtatgtttt

SEQ ID NO: 1317 - RNA, 110 nt, synthetic construct
  source 1..110: mol_type = other RNA
  modified_base 1..3: mod_base = OTHER; note = 2'O-Methyl ribonucleotide
  modified_base 1..3: mod_base = OTHER; note = Phosphorothioate linkage
  modified_base 108..110: mod_base = OTHER; note = 2'O-Methyl ribonucleotide
  modified_base 107..109: mod_base = OTHER; note = Phosphorothioate linkage
atcactgacaggttttgaaagtgttgagaatcgaaagattcttaataaggcatccttccgatgctgacttctcaccgtccgttttccaataggagcgggcggtatgtttt

SEQ ID NO: 1318 - RNA, 110 nt, synthetic construct
  source 1..110: mol_type = other RNA
  modified_base 1..3: mod_base = OTHER; note = 2'O-Methyl ribonucleotide
  modified_base 1..3: mod_base = OTHER; note = Phosphorothioate linkage
  modified_base 108..110: mod_base = OTHER; note = 2'O-Methyl ribonucleotide
  modified_base 107..109: mod_base = OTHER; note = Phosphorothioate linkage
tcactgacaggttttgaaagttgttgagaatcgaaagattcttaataaggcatccttccgatgctgacttctcaccgtccgttttccaataggagcgggcggtatgtttt

SEQ ID NO: 1319 - RNA, 110 nt, synthetic construct; identical to SEQ ID NO: 138
  source 1..110: mol_type = other RNA
  modified_base 1..3: mod_base = OTHER; note = 2'O-Methyl ribonucleotide
  modified_base 1..3: mod_base = OTHER; note = Phosphorothioate linkage
  modified_base 108..110: mod_base = OTHER; note = 2'O-Methyl ribonucleotide
  modified_base 107..109: mod_base = OTHER; note = Phosphorothioate linkage

SEQ ID NO: 1320 - RNA, 110 nt, synthetic construct
  source 1..110: mol_type = other RNA
  modified_base 1..3: mod_base = OTHER; note = 2'O-Methyl ribonucleotide
  modified_base 1..3: mod_base = OTHER; note = Phosphorothioate linkage
  modified_base 108..110: mod_base = OTHER; note = 2'O-Methyl ribonucleotide
  modified_base 107..109: mod_base = OTHER; note = Phosphorothioate linkage
tgaaagtttaggttcgtatctggttgagaatcgaaagattcttaataaggcatccttccgatgctgacttctcaccgtccgttttccaataggagcgggcggtatgtttt

SEQ ID NO: 1321 - DNA, 22 bp, Homo sapiens
  source 1..22: mol_type = genomic DNA
ttctcgaccagcttgacatcac

SEQ ID NO: 1322 - DNA, 22 bp, Homo sapiens
  source 1..22: mol_type = genomic DNA
tctcgaccagcttgacatcaca

SEQ ID NO: 1323 - DNA, 22 bp, Homo sapiens
  source 1..22: mol_type = genomic DNA
tcttggttttacagatacgaac

SEQ ID NO: 1324 - DNA, 22 bp, Homo sapiens
  source 1..22: mol_type = genomic DNA
cttggttttacagatacgaacc

SEQ ID NO: 1325 - DNA, 22 bp, Homo sapiens
  source 1..22: mol_type = genomic DNA
ttacagatacgaacctaaactt

SEQ ID NO: 1326 - DNA, 22 bp, Homo sapiens
  source 1..22: mol_type = genomic DNA
tacagatacgaacctaaacttt

SEQ ID NO: 1327 - DNA, 22 bp, Homo sapiens
  source 1..22: mol_type = genomic DNA
acagatacgaacctaaactttc

SEQ ID NO: 1328 - DNA, 22 bp, Homo sapiens
  source 1..22: mol_type = genomic DNA
aactttcaaaacctgtcagtga

SEQ ID NO: 1329 - DNA, 22 bp, Homo sapiens
  source 1..22: mol_type = genomic DNA
actttcaaaacctgtcagtgat

SEQ ID NO: 1330 - DNA, 22 bp, Homo sapiens
  source 1..22: mol_type = genomic DNA
aaaacctgtcagtgattgggtt

SEQ ID NO: 1331 - DNA, 22 bp, Homo sapiens
  source 1..22: mol_type = genomic DNA
aaacctgtcagtgattgggttc

SEQ ID NO: 1332 - DNA, 22 bp, Homo sapiens
  source 1..22: mol_type = genomic DNA
attgggttccgaatcctcctcc

SEQ ID NO: 1333 - DNA, 22 bp, Homo sapiens
  source 1..22: mol_type = genomic DNA
cgaatcctcctcctgaaagtgg

SEQ ID NO: 1334 - DNA, 22 bp, Homo sapiens
  source 1..22: mol_type = genomic DNA
gaatcctcctcctgaaagtggc

SEQ ID NO: 1335 - DNA, 22 bp, Homo sapiens
  source 1..22: mol_type = genomic DNA
ctcctcctgaaagtggccgggt

SEQ ID NO: 1336 - DNA, 22 bp, Homo sapiens
  source 1..22: mol_type = genomic DNA
agtggccgggtttaatctgctc

SEQ ID NO: 1337 - DNA, 22 bp, Homo sapiens
  source 1..22: mol_type = genomic DNA
atctgctcatgacgctgcggct

SEQ ID NO: 1338 - DNA, 22 bp, Homo sapiens
  source 1..22: mol_type = genomic DNA
tgacgctgcggctgtggtccag

SEQ ID NO: 1339 - DNA, 22 bp, Homo sapiens
  source 1..22: mol_type = genomic DNA
gcggctgtggtccagctgaggt

SEQ ID NO: 1340 - DNA, 22 bp, Homo sapiens
  source 1..22: mol_type = genomic DNA
cggctgtggtccagctgaggtg

SEQ ID NO: 1341 - DNA, 22 bp, Homo sapiens
  source 1..22: mol_type = genomic DNA
ggctgtggtccagctgaggtga

SEQ ID NO: 1342 - DNA, 22 bp, Homo sapiens
  source 1..22: mol_type = genomic DNA
gcttcaaggcccctcacctcag

SEQ ID NO: 1343 - DNA, 22 bp, Homo sapiens
  source 1..22: mol_type = genomic DNA
tcacctcagctggaccacagcc

SEQ ID NO: 1344 - DNA, 22 bp, Homo sapiens
  source 1..22: mol_type = genomic DNA
gaccacagccgcagcgtcatga

SEQ ID NO: 1345 - DNA, 22 bp, Homo sapiens
  source 1..22: mol_type = genomic DNA
cagccgcagcgtcatgagcaga

SEQ ID NO: 1346 - DNA, 22 bp, Homo sapiens
  source 1..22: mol_type = genomic DNA
agccgcagcgtcatgagcagat

SEQ ID NO: 1347 - DNA, 22 bp, Homo sapiens
  source 1..22: mol_type = genomic DNA
ttaaacccggccactttcagga

SEQ ID NO: 1348 - DNA, 22 bp, Homo sapiens
  source 1..22: mol_type = genomic DNA
taaacccggccactttcaggag

SEQ ID NO: 1349 - DNA, 22 bp, Homo sapiens
  source 1..22: mol_type = genomic DNA
aaacccggccactttcaggagg

SEQ ID NO: 1350 - DNA, 22 bp, Homo sapiens
  source 1..22: mol_type = genomic DNA
cggccactttcaggaggaggat

SEQ ID NO: 1351 - DNA, 22 bp, Homo sapiens
  source 1..22: mol_type = genomic DNA
ggccactttcaggaggaggatt

SEQ ID NO: 1352 - DNA, 22 bp, Homo sapiens
  source 1..22: mol_type = genomic DNA
gccactttcaggaggaggattc

SEQ ID NO: 1353 - DNA, 22 bp, Homo sapiens
  source 1..22: mol_type = genomic DNA
aggattcggaacccaatcactg

SEQ ID NO: 1354 - DNA, 22 bp, Homo sapiens
  source 1..22: mol_type = genomic DNA
ggattcggaacccaatcactga

SEQ ID NO: 1355 - DNA, 22 bp, Homo sapiens
  source 1..22: mol_type = genomic DNA
gaacccaatcactgacaggttt

SEQ ID NO: 1356 - DNA, 22 bp, Homo sapiens
  source 1..22: mol_type = genomic DNA
aacccaatcactgacaggtttt

SEQ ID NO: 1357 - DNA, 22 bp, Homo sapiens
  source 1..22: mol_type = genomic DNA
acccaatcactgacaggttttg

SEQ ID NO: 1358 - DNA, 22 bp, Homo sapiens
  source 1..22: mol_type = genomic DNA
atcactgacaggttttgaaagt

SEQ ID NO: 1359 - DNA, 22 bp, Homo sapiens
  source 1..22: mol_type = genomic DNA
tcactgacaggttttgaaagtt

SEQ ID NO: 1360 - DNA, 22 bp, Homo sapiens
  source 1..22: mol_type = genomic DNA
ttgaaagtttaggttcgtatct

SEQ ID NO: 1361 - DNA, 22 bp, Homo sapiens
  source 1..22: mol_type = genomic DNA
tgaaagtttaggttcgtatctg

SEQ ID NO: 1362 - RNA, 110 nt, synthetic construct; identical to SEQ ID NO: 573
  source 1..110: mol_type = other RNA
  modified_base 1..3: mod_base = OTHER; note = 2'O-Methyl ribonucleotide
  modified_base 1..3: mod_base = OTHER; note = Phosphorothioate linkage
  modified_base 108..110: mod_base = OTHER; note = 2'O-Methyl ribonucleotide
  modified_base 107..109: mod_base = OTHER; note = Phosphorothioate linkage

SEQ ID NO: 1363 - RNA, 110 nt, synthetic construct; identical to SEQ ID NO: 574
  source 1..110: mol_type = other RNA
  modified_base 1..3: mod_base = OTHER; note = 2'O-Methyl ribonucleotide
  modified_base 1..3: mod_base = OTHER; note = Phosphorothioate linkage
  modified_base 108..110: mod_base = OTHER; note = 2'O-Methyl ribonucleotide
  modified_base 107..109: mod_base = OTHER; note = Phosphorothioate linkage

SEQ ID NO: 1364 - RNA, 110 nt, synthetic construct; identical to SEQ ID NO: 575
  source 1..110: mol_type = other RNA
  modified_base 1..3: mod_base = OTHER; note = 2'O-Methyl ribonucleotide
  modified_base 1..3: mod_base = OTHER; note = Phosphorothioate linkage
  modified_base 108..110: mod_base = OTHER; note = 2'O-Methyl ribonucleotide
  modified_base 107..109: mod_base = OTHER; note = Phosphorothioate linkage

SEQ ID NO: 1365 - RNA, 110 nt, synthetic construct; identical to SEQ ID NO: 576
  source 1..110: mol_type = other RNA
  modified_base 1..3: mod_base = OTHER; note = 2'O-Methyl ribonucleotide
  modified_base 1..3: mod_base = OTHER; note = Phosphorothioate linkage
  modified_base 108..110: mod_base = OTHER; note = 2'O-Methyl ribonucleotide
  modified_base 107..109: mod_base = OTHER; note = Phosphorothioate linkage

SEQ ID NO: 1366 - RNA, 110 nt, synthetic construct; identical to SEQ ID NO: 577
  source 1..110: mol_type = other RNA
  modified_base 1..3: mod_base = OTHER; note = 2'O-Methyl ribonucleotide
  modified_base 1..3: mod_base = OTHER; note = Phosphorothioate linkage
  modified_base 108..110: mod_base = OTHER; note = 2'O-Methyl ribonucleotide
  modified_base 107..109: mod_base = OTHER; note = Phosphorothioate linkage

SEQ ID NO: 1367 - RNA, 110 nt, synthetic construct; identical to SEQ ID NO: 578
  source 1..110: mol_type = other RNA
  modified_base 1..3: mod_base = OTHER; note = 2'O-Methyl ribonucleotide
  modified_base 1..3: mod_base = OTHER; note = Phosphorothioate linkage
  modified_base 108..110: mod_base = OTHER; note = 2'O-Methyl ribonucleotide
  modified_base 107..109: mod_base = OTHER; note = Phosphorothioate linkage

SEQ ID NO: 1368 - RNA, 110 nt, synthetic construct; identical to SEQ ID NO: 579
  source 1..110: mol_type = other RNA
  modified_base 1..3: mod_base = OTHER; note = 2'O-Methyl ribonucleotide
  modified_base 1..3: mod_base = OTHER; note = Phosphorothioate linkage
  modified_base 108..110: mod_base = OTHER; note = 2'O-Methyl ribonucleotide
  modified_base 107..109: mod_base = OTHER; note = Phosphorothioate linkage

SEQ ID NO: 1369 - RNA, 110 nt, synthetic construct; identical to SEQ ID NO: 580
  source 1..110: mol_type = other RNA
  modified_base 1..3: mod_base = OTHER; note = 2'O-Methyl ribonucleotide
  modified_base 1..3: mod_base = OTHER; note = Phosphorothioate linkage
  modified_base 108..110: mod_base = OTHER; note = 2'O-Methyl ribonucleotide
  modified_base 107..109: mod_base = OTHER; note = Phosphorothioate linkage

SEQ ID NO: 1370 - RNA, 110 nt, synthetic construct; identical to SEQ ID NO: 581
  source 1..110: mol_type = other RNA
  modified_base 1..3: mod_base = OTHER; note = 2'O-Methyl ribonucleotide
  modified_base 1..3: mod_base = OTHER; note = Phosphorothioate linkage
  modified_base 108..110: mod_base = OTHER; note = 2'O-Methyl ribonucleotide
  modified_base 107..109: mod_base = OTHER; note = Phosphorothioate linkage

SEQ ID NO: 1371 - RNA, 110 nt, synthetic construct; identical to SEQ ID NO: 582
  source 1..110: mol_type = other RNA
  modified_base 1..3: mod_base = OTHER; note = 2'O-Methyl ribonucleotide
  modified_base 1..3: mod_base = OTHER; note = Phosphorothioate linkage
  modified_base 108..110: mod_base = OTHER; note = 2'O-Methyl ribonucleotide
  modified_base 107..109: mod_base = OTHER; note = Phosphorothioate linkage

SEQ ID NO: 1372 - RNA, 110 nt, synthetic construct; identical to SEQ ID NO: 583
  source 1..110: mol_type = other RNA
  modified_base 1..3: mod_base = OTHER; note = 2'O-Methyl ribonucleotide
  modified_base 1..3: mod_base = OTHER; note = Phosphorothioate linkage
  modified_base 108..110: mod_base = OTHER; note = 2'O-Methyl ribonucleotide
  modified_base 107..109: mod_base = OTHER; note = Phosphorothioate linkage

SEQ ID NO: 1373 - RNA, 110 nt, synthetic construct; identical to SEQ ID NO: 584
  source 1..110: mol_type = other RNA
  modified_base 1..3: mod_base = OTHER; note = 2'O-Methyl ribonucleotide
  modified_base 1..3: mod_base = OTHER; note = Phosphorothioate linkage
  modified_base 108..110: mod_base = OTHER; note = 2'O-Methyl ribonucleotide
  modified_base 107..109: mod_base = OTHER; note = Phosphorothioate linkage

SEQ ID NO: 1374 - RNA, 110 nt, synthetic construct; identical to SEQ ID NO: 585
  source 1..110: mol_type = other RNA
  modified_base 1..3: mod_base = OTHER; note = 2'O-Methyl ribonucleotide
  modified_base 1..3: mod_base = OTHER; note = Phosphorothioate linkage
  modified_base 108..110: mod_base = OTHER; note = 2'O-Methyl ribonucleotide
  modified_base 107..109: mod_base = OTHER; note = Phosphorothioate linkage

SEQ ID NO: 1375 - RNA, 110 nt, synthetic construct; identical to SEQ ID NO: 586
  source 1..110: mol_type = other RNA
  modified_base 1..3: mod_base = OTHER; note = 2'O-Methyl ribonucleotide
  modified_base 1..3: mod_base = OTHER; note = Phosphorothioate linkage
  modified_base 108..110: mod_base = OTHER; note = 2'O-Methyl ribonucleotide
  modified_base 107..109: mod_base = OTHER; note = Phosphorothioate linkage

SEQ ID NO: 1376 - RNA, 110 nt, synthetic construct; identical to SEQ ID NO: 587
  source 1..110: mol_type = other RNA
  modified_base 1..3: mod_base = OTHER; note = 2'O-Methyl ribonucleotide
  modified_base 1..3: mod_base = OTHER; note = Phosphorothioate linkage
  modified_base 108..110: mod_base = OTHER; note = 2'O-Methyl ribonucleotide
  modified_base 107..109: mod_base = OTHER; note = Phosphorothioate linkage

SEQ ID NO: 1377 - DNA, 22 bp, Homo sapiens
  source 1..22: mol_type = genomic DNA
acccctccacggtaccgggcgg

SEQ ID NO: 1378 - DNA, 22 bp, Homo sapiens
  source 1..22: mol_type = genomic DNA
accagcatacagagtgaccacc

SEQ ID NO: 1379 - DNA, 22 bp, Homo sapiens
  source 1..22: mol_type = genomic DNA
ccagcatacagagtgaccaccg

SEQ ID NO: 1380 - DNA, 22 bp, Homo sapiens
  source 1..22: mol_type = genomic DNA
cagggtcatggtcaccgacttc

SEQ ID NO: 1381 - DNA, 22 bp, Homo sapiens
  source 1..22: mol_type = genomic DNA
cctcccaggcctggagtttatt

SEQ ID NO: 1382 - DNA, 22 bp, Homo sapiens
  source 1..22: mol_type = genomic DNA
ctcccaggcctggagtttattc

SEQ ID NO: 1383 - DNA, 22 bp, Homo sapiens
  source 1..22: mol_type = genomic DNA
caggctggaccagctggctttt

SEQ ID NO: 1384 - DNA, 22 bp, Homo sapiens
  source 1..22: mol_type = genomic DNA
ggtggccccaactgtgatgacc

SEQ ID NO: 1385 - DNA, 22 bp, Homo sapiens
  source 1..22: mol_type = genomic DNA
gccccgccgcttcccactcctg

SEQ ID NO: 1386 - DNA, 22 bp, Homo sapiens
  source 1..22: mol_type = genomic DNA
agtgtgctgaccatacagtcct

SEQ ID NO: 1387 - DNA, 22 bp, Homo sapiens
  source 1..22: mol_type = genomic DNA
cctgcaaaacagctgccaacct

SEQ ID NO: 1388 - DNA, 22 bp, Homo sapiens
  source 1..22: mol_type = genomic DNA
ctgcaaaacagctgccaacctg

SEQ ID NO: 1389 - DNA, 22 bp, Homo sapiens
  source 1..22: mol_type = genomic DNA
aatggcgtagacaccctcaccc

SEQ ID NO: 1390 - DNA, 22 bp, Homo sapiens
  source 1..22: mol_type = genomic DNA
tcctgctgccatgccccaggtc

SEQ ID NO: 1391 - DNA, 22 bp, Homo sapiens
  source 1..22: mol_type = genomic DNA
tggaatgcaaagtcaaggagca

SEQ ID NO: 1392 - RNA, 110 nt, synthetic construct; identical to SEQ ID NO: 383
  source 1..110: mol_type = other RNA
  modified_base 1..3: mod_base = OTHER; note = 2'O-Methyl ribonucleotide
  modified_base 1..3: mod_base = OTHER; note = Phosphorothioate linkage
  modified_base 108..110: mod_base = OTHER; note = 2'O-Methyl ribonucleotide
  modified_base 107..109: mod_base = OTHER; note = Phosphorothioate linkage

SEQ ID NO: 1393 - RNA, 110 nt, synthetic construct; identical to SEQ ID NO: 384
  source 1..110: mol_type = other RNA
  modified_base 1..3: mod_base = OTHER; note = 2'O-Methyl ribonucleotide
  modified_base 1..3: mod_base = OTHER; note = Phosphorothioate linkage
  modified_base 108..110: mod_base = OTHER; note = 2'O-Methyl ribonucleotide
  modified_base 107..109: mod_base = OTHER; note = Phosphorothioate linkage

SEQ ID NO: 1394 - RNA, 110 nt, synthetic construct; identical to SEQ ID NO: 385
  source 1..110: mol_type = other RNA
  modified_base 1..3: mod_base = OTHER; note = 2'O-Methyl ribonucleotide
  modified_base 1..3: mod_base = OTHER; note = Phosphorothioate linkage
  modified_base 108..110: mod_base = OTHER; note = 2'O-Methyl ribonucleotide
  modified_base 107..109: mod_base = OTHER; note = Phosphorothioate linkage

SEQ ID NO: 1395 - RNA, 110 nt, synthetic construct; identical to SEQ ID NO: 386
  source 1..110: mol_type = other RNA
  modified_base 1..3: mod_base = OTHER; note = 2'O-Methyl ribonucleotide
  modified_base 1..3: mod_base = OTHER; note = Phosphorothioate linkage
  modified_base 108..110: mod_base = OTHER; note = 2'O-Methyl ribonucleotide
  modified_base 107..109: mod_base = OTHER; note = Phosphorothioate linkage

SEQ ID NO: 1396 - RNA, 110 nt, synthetic construct; identical to SEQ ID NO: 387
  source 1..110: mol_type = other RNA
  modified_base 1..3: mod_base = OTHER; note = 2'O-Methyl ribonucleotide
  modified_base 1..3: mod_base = OTHER; note = Phosphorothioate linkage
  modified_base 108..110: mod_base = OTHER; note = 2'O-Methyl ribonucleotide
  modified_base 107..109: mod_base = OTHER; note = Phosphorothioate linkage

SEQ ID NO: 1397 - RNA, 110 nt, synthetic construct; identical to SEQ ID NO: 388
  source 1..110: mol_type = other RNA
  modified_base 1..3: mod_base = OTHER; note = 2'O-Methyl ribonucleotide
  modified_base 1..3: mod_base = OTHER; note = Phosphorothioate linkage
  modified_base 108..110: mod_base = OTHER; note = 2'O-Methyl ribonucleotide
  modified_base 107..109: mod_base = OTHER; note = Phosphorothioate linkage

SEQ ID NO: 1398 - RNA, 110 nt, synthetic construct; identical to SEQ ID NO: 389
  source 1..110: mol_type = other RNA
  modified_base 1..3: mod_base = OTHER; note = 2'O-Methyl ribonucleotide
  modified_base 1..3: mod_base = OTHER; note = Phosphorothioate linkage
  modified_base 108..110: mod_base = OTHER; note = 2'O-Methyl ribonucleotide
  modified_base 107..109: mod_base = OTHER; note = Phosphorothioate linkage

SEQ ID NO: 1399 - RNA, 110 nt, synthetic construct; identical to SEQ ID NO: 390
  source 1..110: mol_type = other RNA
  modified_base 1..3: mod_base = OTHER; note = 2'O-Methyl ribonucleotide
  modified_base 1..3: mod_base = OTHER; note = Phosphorothioate linkage
  modified_base 108..110: mod_base = OTHER; note = 2'O-Methyl ribonucleotide
  modified_base 107..109: mod_base = OTHER; note = Phosphorothioate linkage

SEQ ID NO: 1400 - RNA, 110 nt, synthetic construct; identical to SEQ ID NO: 391
  source 1..110: mol_type = other RNA
  modified_base 1..3: mod_base = OTHER; note = 2'O-Methyl ribonucleotide
  modified_base 1..3: mod_base = OTHER; note = Phosphorothioate linkage
  modified_base 108..110: mod_base = OTHER; note = 2'O-Methyl ribonucleotide
  modified_base 107..109: mod_base = OTHER; note = Phosphorothioate linkage

SEQ ID NO: 1401 - RNA, 110 nt, synthetic construct; identical to SEQ ID NO: 392
  source 1..110: mol_type = other RNA
  modified_base 1..3: mod_base = OTHER; note = 2'O-Methyl ribonucleotide
  modified_base 1..3: mod_base = OTHER; note = Phosphorothioate linkage
  modified_base 108..110: mod_base = OTHER; note = 2'O-Methyl ribonucleotide
  modified_base 107..109: mod_base = OTHER; note = Phosphorothioate linkage

SEQ ID NO: 1402 - RNA, 110 nt, synthetic construct; identical to SEQ ID NO: 393
  source 1..110: mol_type = other RNA
  modified_base 1..3: mod_base = OTHER; note = 2'O-Methyl ribonucleotide
  modified_base 1..3: mod_base = OTHER; note = Phosphorothioate linkage
  modified_base 108..110: mod_base = OTHER; note = 2'O-Methyl ribonucleotide
  modified_base 107..109: mod_base = OTHER; note = Phosphorothioate linkage

SEQ ID NO: 1403 - RNA, 110 nt, synthetic construct; identical to SEQ ID NO: 394
  source 1..110: mol_type = other RNA
  modified_base 1..3: mod_base = OTHER; note = 2'O-Methyl ribonucleotide
  modified_base 1..3: mod_base = OTHER; note = Phosphorothioate linkage
  modified_base 108..110: mod_base = OTHER; note = 2'O-Methyl ribonucleotide
  modified_base 107..109: mod_base = OTHER; note = Phosphorothioate linkage

SEQ ID NO: 1404 - RNA, 110 nt, synthetic construct; identical to SEQ ID NO: 395
  source 1..110: mol_type = other RNA
  modified_base 1..3: mod_base = OTHER; note = 2'O-Methyl ribonucleotide
  modified_base 1..3: mod_base = OTHER; note = Phosphorothioate linkage
  modified_base 108..110: mod_base = OTHER; note = 2'O-Methyl ribonucleotide
  modified_base 107..109: mod_base = OTHER; note = Phosphorothioate linkage

SEQ ID NO: 1405 - RNA, 110 nt, synthetic construct; identical to SEQ ID NO: 396
  source 1..110: mol_type = other RNA
  modified_base 1..3: mod_base = OTHER; note = 2'O-Methyl ribonucleotide
  modified_base 1..3: mod_base = OTHER; note = Phosphorothioate linkage
  modified_base 108..110: mod_base = OTHER; note = 2'O-Methyl ribonucleotide
  modified_base 107..109: mod_base = OTHER; note = Phosphorothioate linkage

SEQ ID NO: 1406 - RNA, 110 nt, synthetic construct; identical to SEQ ID NO: 397
  source 1..110: mol_type = other RNA
  modified_base 1..3: mod_base = OTHER; note = 2'O-Methyl ribonucleotide
  modified_base 1..3: mod_base = OTHER; note = Phosphorothioate linkage
  modified_base 108..110: mod_base = OTHER; note = 2'O-Methyl ribonucleotide
  modified_base 107..109: mod_base = OTHER; note = Phosphorothioate linkage

SEQ ID NO: 1407 - RNA, 110 nt, synthetic construct; identical to SEQ ID NO: 398
  source 1..110: mol_type = other RNA
  modified_base 1..3: mod_base = OTHER; note = 2'O-Methyl ribonucleotide
  modified_base 1..3: mod_base = OTHER; note = Phosphorothioate linkage
  modified_base 108..110: mod_base = OTHER; note = 2'O-Methyl ribonucleotide
  modified_base 107..109: mod_base = OTHER; note = Phosphorothioate linkage

SEQ ID NO: 1408 - RNA, 110 nt, synthetic construct; identical to SEQ ID NO: 399
  source 1..110: mol_type = other RNA
  modified_base 1..3: mod_base = OTHER; note = 2'O-Methyl ribonucleotide
  modified_base 1..3: mod_base = OTHER; note = Phosphorothioate linkage
  modified_base 108..110: mod_base = OTHER; note = 2'O-Methyl ribonucleotide
  modified_base 107..109: mod_base = OTHER; note = Phosphorothioate linkage

SEQ ID NO: 1409 - RNA, 110 nt, synthetic construct; identical to SEQ ID NO: 400
  source 1..110: mol_type = other RNA
  modified_base 1..3: mod_base = OTHER; note = 2'O-Methyl ribonucleotide
  modified_base 1..3: mod_base = OTHER; note = Phosphorothioate linkage
  modified_base 108..110: mod_base = OTHER; note = 2'O-Methyl ribonucleotide
  modified_base 107..109: mod_base = OTHER; note = Phosphorothioate linkage

SEQ ID NO: 1410 - RNA, 110 nt, synthetic construct; identical to SEQ ID NO: 401
  source 1..110: mol_type = other RNA
  modified_base 1..3: mod_base = OTHER; note = 2'O-Methyl ribonucleotide
  modified_base 1..3: mod_base = OTHER; note = Phosphorothioate linkage
  modified_base 108..110: mod_base = OTHER; note = 2'O-Methyl ribonucleotide
  modified_base 107..109: mod_base = OTHER; note = Phosphorothioate linkage

SEQ ID NO: 1411 - RNA, 110 nt, synthetic construct; identical to SEQ ID NO: 402
  source 1..110: mol_type = other RNA
  modified_base 1..3: mod_base = OTHER; note = 2'O-Methyl ribonucleotide
  modified_base 1..3: mod_base = OTHER; note = Phosphorothioate linkage
  modified_base 108..110: mod_base = OTHER; note = 2'O-Methyl ribonucleotide
  modified_base 107..109: mod_base = OTHER; note = Phosphorothioate linkage

SEQ ID NO: 1412 - RNA, 110 nt, synthetic construct; identical to SEQ ID NO: 403
  source 1..110: mol_type = other RNA
  modified_base 1..3: mod_base = OTHER; note = 2'O-Methyl ribonucleotide
  modified_base 1..3: mod_base = OTHER; note = Phosphorothioate linkage
  modified_base 108..110: mod_base = OTHER; note = 2'O-Methyl ribonucleotide
  modified_base 107..109: mod_base = OTHER; note = Phosphorothioate linkage

SEQ ID NO: 1413 - RNA, 110 nt, synthetic construct; identical to SEQ ID NO: 404
  source 1..110: mol_type = other RNA
  modified_base 1..3: mod_base = OTHER; note = 2'O-Methyl ribonucleotide
  modified_base 1..3: mod_base = OTHER; note = Phosphorothioate linkage
  modified_base 108..110: mod_base = OTHER; note = 2'O-Methyl ribonucleotide
  modified_base 107..109: mod_base = OTHER; note = Phosphorothioate linkage

SEQ ID NO: 1414 - RNA, 110 nt, synthetic construct; identical to SEQ ID NO: 405
  source 1..110: mol_type = other RNA
  modified_base 1..3: mod_base = OTHER; note = 2'O-Methyl ribonucleotide
  modified_base 1..3: mod_base = OTHER; note = Phosphorothioate linkage
  modified_base 108..110: mod_base = OTHER; note = 2'O-Methyl ribonucleotide
  modified_base 107..109: mod_base = OTHER; note = Phosphorothioate linkage

SEQ ID NO: 1415 - RNA, 110 nt, synthetic construct; identical to SEQ ID NO: 406
  source 1..110: mol_type = other RNA
  modified_base 1..3: mod_base = OTHER; note = 2'O-Methyl ribonucleotide
  modified_base 1..3: mod_base = OTHER; note = Phosphorothioate linkage
  modified_base 108..110: mod_base = OTHER; note = 2'O-Methyl ribonucleotide
  modified_base 107..109: mod_base = OTHER; note = Phosphorothioate linkage

SEQ ID NO: 1416 - RNA, 110 nt, synthetic construct; identical to SEQ ID NO: 407
  source 1..110: mol_type = other RNA
  modified_base 1..3: mod_base = OTHER; note = 2'O-Methyl ribonucleotide
  modified_base 1..3: mod_base = OTHER; note = Phosphorothioate linkage
  modified_base 108..110: mod_base = OTHER; note = 2'O-Methyl ribonucleotide
  modified_base 107..109: mod_base = OTHER; note = Phosphorothioate linkage

SEQ ID NO: 1417 - RNA, 110 nt, synthetic construct; identical to SEQ ID NO: 408
  source 1..110: mol_type = other RNA
  modified_base 1..3: mod_base = OTHER; note = 2'O-Methyl ribonucleotide
  modified_base 1..3: mod_base = OTHER; note = Phosphorothioate linkage
  modified_base 108..110: mod_base = OTHER; note = 2'O-Methyl ribonucleotide
  modified_base 107..109: mod_base = OTHER; note = Phosphorothioate linkage

SEQ ID NO: 1418 - RNA, 110 nt, synthetic construct; identical to SEQ ID NO: 409
  source 1..110: mol_type = other RNA
  modified_base 1..3: mod_base = OTHER; note = 2'O-Methyl ribonucleotide
  modified_base 1..3: mod_base = OTHER; note = Phosphorothioate linkage
  modified_base 108..110: mod_base = OTHER; note = 2'O-Methyl ribonucleotide
  modified_base 107..109: mod_base = OTHER; note = Phosphorothioate linkage

SEQ ID NO: 1419 - RNA, 110 nt, synthetic construct; identical to SEQ ID NO: 410
  source 1..110: mol_type = other RNA
  modified_base 1..3: mod_base = OTHER; note = 2'O-Methyl ribonucleotide
  modified_base 1..3: mod_base = OTHER; note = Phosphorothioate linkage
  modified_base 108..110: mod_base = OTHER; note = 2'O-Methyl ribonucleotide
  modified_base 107..109: mod_base = OTHER; note = Phosphorothioate linkage

SEQ ID NO: 1420 - RNA, 110 nt, synthetic construct; identical to SEQ ID NO: 411
  source 1..110: mol_type = other RNA
  modified_base 1..3: mod_base = OTHER; note = 2'O-Methyl ribonucleotide
  modified_base 1..3: mod_base = OTHER; note = Phosphorothioate linkage
  modified_base 108..110: mod_base = OTHER; note = 2'O-Methyl ribonucleotide
  modified_base 107..109: mod_base = OTHER; note = Phosphorothioate linkage

SEQ ID NO: 1421 - RNA, 110 nt, synthetic construct; identical to SEQ ID NO: 412
  source 1..110: mol_type = other RNA
  modified_base 1..3: mod_base = OTHER; note = 2'O-Methyl ribonucleotide
  modified_base 1..3: mod_base = OTHER; note = Phosphorothioate linkage
  modified_base 108..110: mod_base = OTHER; note = 2'O-Methyl ribonucleotide
  modified_base 107..109: mod_base = OTHER; note = Phosphorothioate linkage

SEQ ID NO: 1422 - RNA, 110 nt, synthetic construct; identical to SEQ ID NO: 413
  source 1..110: mol_type = other RNA
  modified_base 1..3: mod_base = OTHER; note = 2'O-Methyl ribonucleotide
  modified_base 1..3: mod_base = OTHER; note = Phosphorothioate linkage
  modified_base 108..110: mod_base = OTHER; note = 2'O-Methyl ribonucleotide
  modified_base 107..109: mod_base = OTHER; note = Phosphorothioate linkage

SEQ ID NO: 1423 - RNA, 110 nt, synthetic construct; identical to SEQ ID NO: 414
  source 1..110: mol_type = other RNA
  modified_base 1..3: mod_base = OTHER; note = 2'O-Methyl ribonucleotide
  modified_base 1..3: mod_base = OTHER; note = Phosphorothioate linkage
  modified_base 108..110: mod_base = OTHER; note = 2'O-Methyl ribonucleotide
  modified_base 107..109: mod_base = OTHER; note = Phosphorothioate linkage

SEQ ID NO: 1424 - RNA, 110 nt, synthetic construct; identical to SEQ ID NO: 415
  source 1..110: mol_type = other RNA
  modified_base 1..3: mod_base = OTHER; note = 2'O-Methyl ribonucleotide
  modified_base 1..3: mod_base = OTHER; note = Phosphorothioate linkage
  modified_base 108..110: mod_base = OTHER; note = 2'O-Methyl ribonucleotide
  modified_base 107..109: mod_base = OTHER; note = Phosphorothioate linkage

SEQ ID NO: 1425 - RNA, 110 nt, synthetic construct; identical to SEQ ID NO: 416
  source 1..110: mol_type = other RNA
  modified_base 1..3: mod_base = OTHER; note = 2'O-Methyl ribonucleotide
  modified_base 1..3: mod_base = OTHER; note = Phosphorothioate linkage
  modified_base 108..110: mod_base = OTHER; note = 2'O-Methyl ribonucleotide
  modified_base 107..109: mod_base = OTHER; note = Phosphorothioate linkage

SEQ ID NO: 1426 - RNA, 110 nt, synthetic construct; identical to SEQ ID NO: 417
  source 1..110: mol_type = other RNA
  modified_base 1..3: mod_base = OTHER; note = 2'O-Methyl ribonucleotide
  modified_base 1..3: mod_base = OTHER; note = Phosphorothioate linkage
  modified_base 108..110: mod_base = OTHER; note = 2'O-Methyl ribonucleotide
  modified_base 107..109: mod_base = OTHER; note = Phosphorothioate linkage

SEQ ID NO: 1427 - RNA, 110 nt, synthetic construct; identical to SEQ ID NO: 418
  source 1..110: mol_type = other RNA
  modified_base 1..3: mod_base = OTHER; note = 2'O-Methyl ribonucleotide
  modified_base 1..3: mod_base = OTHER; note = Phosphorothioate linkage
  modified_base 108..110: mod_base = OTHER; note = 2'O-Methyl ribonucleotide
  modified_base 107..109: mod_base = OTHER; note = Phosphorothioate linkage

SEQ ID NO: 1428 - RNA, 110 nt, synthetic construct; identical to SEQ ID NO: 419
  source 1..110: mol_type = other RNA
  modified_base 1..3: mod_base = OTHER; note = 2'O-Methyl ribonucleotide
  modified_base 1..3: mod_base = OTHER; note = Phosphorothioate linkage
  modified_base 108..110: mod_base = OTHER; note = 2'O-Methyl ribonucleotide
  modified_base 107..109: mod_base = OTHER; note = Phosphorothioate linkage

SEQ ID NO: 1429 - RNA, 110 nt, synthetic construct; identical to SEQ ID NO: 420
  source 1..110: mol_type = other RNA
  modified_base 1..3: mod_base = OTHER; note = 2'O-Methyl ribonucleotide
  modified_base 1..3: mod_base = OTHER; note = Phosphorothioate linkage
  modified_base 108..110: mod_base = OTHER; note = 2'O-Methyl ribonucleotide
  modified_base 107..109: mod_base = OTHER; note = Phosphorothioate linkage

SEQ ID NO: 1430 - RNA, 110 nt, synthetic construct; identical to SEQ ID NO: 421
  source 1..110: mol_type = other RNA
  modified_base 1..3: mod_base = OTHER; note = 2'O-Methyl ribonucleotide
  modified_base 1..3: mod_base = OTHER; note = Phosphorothioate linkage
  modified_base 108..110: mod_base = OTHER; note = 2'O-Methyl ribonucleotide
  modified_base 107..109: mod_base = OTHER; note = Phosphorothioate linkage

SEQ ID NO: 1431 - RNA, 110 nt, synthetic construct; identical to SEQ ID NO: 422
  source 1..110: mol_type = other RNA
  modified_base 1..3: mod_base = OTHER; note = 2'O-Methyl ribonucleotide
  modified_base 1..3: mod_base = OTHER; note = Phosphorothioate linkage
  modified_base 108..110: mod_base = OTHER; note = 2'O-Methyl ribonucleotide
  modified_base 107..109: mod_base = OTHER; note = Phosphorothioate linkage

SEQ ID NO: 1432 - RNA, 110 nt, synthetic construct; identical to SEQ ID NO: 423
  source 1..110: mol_type = other RNA
  modified_base 1..3: mod_base = OTHER; note = 2'O-Methyl ribonucleotide
  modified_base 1..3: mod_base = OTHER; note = Phosphorothioate linkage
  modified_base 108..110: mod_base = OTHER; note = 2'O-Methyl ribonucleotide
  modified_base 107..109: mod_base = OTHER; note = Phosphorothioate linkage

SEQ ID NO: 1433 - RNA, 110 nt, synthetic construct; identical to SEQ ID NO: 424
  source 1..110: mol_type = other RNA
  modified_base 1..3: mod_base = OTHER; note = 2'O-Methyl ribonucleotide
  modified_base 1..3: mod_base = OTHER; note = Phosphorothioate linkage
  modified_base 108..110: mod_base = OTHER; note = 2'O-Methyl ribonucleotide
  modified_base 107..109: mod_base = OTHER; note = Phosphorothioate linkage

SEQ ID NO: 1434 - RNA, 110 nt, synthetic construct; identical to SEQ ID NO: 425
  source 1..110: mol_type = other RNA
  modified_base 1..3: mod_base = OTHER; note = 2'O-Methyl ribonucleotide
  modified_base 1..3: mod_base = OTHER; note = Phosphorothioate linkage
  modified_base 108..110: mod_base = OTHER; note = 2'O-Methyl ribonucleotide
  modified_base 107..109: mod_base = OTHER; note = Phosphorothioate linkage

SEQ ID NO: 1435 - RNA, 110 nt, synthetic construct; identical to SEQ ID NO: 426
  source 1..110: mol_type = other RNA
  modified_base 1..3: mod_base = OTHER; note = 2'O-Methyl ribonucleotide
  modified_base 1..3: mod_base = OTHER; note = Phosphorothioate linkage
  modified_base 108..110: mod_base = OTHER; note = 2'O-Methyl ribonucleotide
  modified_base 107..109: mod_base = OTHER; note = Phosphorothioate linkage

SEQ ID NO: 1436 - RNA, 110 nt, synthetic construct; identical to SEQ ID NO: 427
  source 1..110: mol_type = other RNA
  modified_base 1..3: mod_base = OTHER; note = 2'O-Methyl ribonucleotide
  modified_base 1..3: mod_base = OTHER; note = Phosphorothioate linkage
  modified_base 108..110: mod_base = OTHER; note = 2'O-Methyl ribonucleotide
  modified_base 107..109: mod_base = OTHER; note = Phosphorothioate linkage

SEQ ID NO: 1437 - RNA, 110 nt, synthetic construct; identical to SEQ ID NO: 428
  source 1..110: mol_type = other RNA
  modified_base 1..3: mod_base = OTHER; note = 2'O-Methyl ribonucleotide
  modified_base 1..3: mod_base = OTHER; note = Phosphorothioate linkage
  modified_base 108..110: mod_base = OTHER; note = 2'O-Methyl ribonucleotide
  modified_base 107..109: mod_base = OTHER; note = Phosphorothioate linkage

SEQ ID NO: 1438 - RNA, 110 nt, synthetic construct; identical to SEQ ID NO: 429
  source 1..110: mol_type = other RNA
  modified_base 1..3: mod_base = OTHER; note = 2'O-Methyl ribonucleotide
  modified_base 1..3: mod_base = OTHER; note = Phosphorothioate linkage
  modified_base 108..110: mod_base = OTHER; note = 2'O-Methyl ribonucleotide
  modified_base 107..109: mod_base = OTHER; note = Phosphorothioate linkage

SEQ ID NO: 1439 - RNA, 110 nt, synthetic construct; identical to SEQ ID NO: 430
  source 1..110: mol_type = other RNA
  modified_base 1..3: mod_base = OTHER; note = 2'O-Methyl ribonucleotide
  modified_base 1..3: mod_base = OTHER; note = Phosphorothioate linkage
  modified_base 108..110: mod_base = OTHER; note = 2'O-Methyl ribonucleotide
  modified_base 107..109: mod_base = OTHER; note = Phosphorothioate linkage

SEQ ID NO: 1440 - RNA, 110 nt, synthetic construct; identical to SEQ ID NO: 431
  source 1..110: mol_type = other RNA
  modified_base 1..3: mod_base = OTHER; note = 2'O-Methyl ribonucleotide
  modified_base 1..3: mod_base = OTHER; note = Phosphorothioate linkage
  modified_base 108..110: mod_base = OTHER; note = 2'O-Methyl ribonucleotide
  modified_base 107..109: mod_base = OTHER; note = Phosphorothioate linkage

SEQ ID NO: 1441 - RNA, 110 nt, synthetic construct; identical to SEQ ID NO: 432
  source 1..110: mol_type = other RNA
  modified_base 1..3: mod_base = OTHER; note = 2'O-Methyl ribonucleotide
  modified_base 1..3: mod_base = OTHER; note = Phosphorothioate linkage
  modified_base 108..110: mod_base = OTHER; note = 2'O-Methyl ribonucleotide
  modified_base 107..109: mod_base = OTHER; note = Phosphorothioate linkage

SEQ ID NO: 1442 - RNA, 110 nt, synthetic construct; identical to SEQ ID NO: 433
  source 1..110: mol_type = other RNA
  modified_base 1..3: mod_base = OTHER; note = 2'O-Methyl ribonucleotide
  modified_base 1..3: mod_base = OTHER; note = Phosphorothioate linkage
  modified_base 108..110: mod_base = OTHER; note = 2'O-Methyl ribonucleotide
  modified_base 107..109: mod_base = OTHER; note = Phosphorothioate linkage

SEQ ID NO: 1443 - RNA, 110 nt, synthetic construct; identical to SEQ ID NO: 434
  source 1..110: mol_type = other RNA
  modified_base 1..3: mod_base = OTHER; note = 2'O-Methyl ribonucleotide
  modified_base 1..3: mod_base = OTHER; note = Phosphorothioate linkage
  modified_base 108..110: mod_base = OTHER; note = 2'O-Methyl ribonucleotide
  modified_base 107..109: mod_base = OTHER; note = Phosphorothioate linkage

SEQ ID NO: 1444 - RNA, 110 nt, synthetic construct; identical to SEQ ID NO: 435
  source 1..110: mol_type = other RNA
  modified_base 1..3: mod_base = OTHER; note = 2'O-Methyl ribonucleotide
  modified_base 1..3: mod_base = OTHER; note = Phosphorothioate linkage
  modified_base 108..110: mod_base = OTHER; note = 2'O-Methyl ribonucleotide
  modified_base 107..109: mod_base = OTHER; note = Phosphorothioate linkage

SEQ ID NO: 1445 - RNA, 110 nt, synthetic construct; identical to SEQ ID NO: 436
  source 1..110: mol_type = other RNA
  modified_base 1..3: mod_base = OTHER; note = 2'O-Methyl ribonucleotide
  modified_base 1..3: mod_base = OTHER; note = Phosphorothioate linkage
  modified_base 108..110: mod_base = OTHER; note = 2'O-Methyl ribonucleotide
  modified_base 107..109: mod_base = OTHER; note = Phosphorothioate linkage

SEQ ID NO: 1446 - RNA, 110 nt, synthetic construct; identical to SEQ ID NO: 437
  source 1..110: mol_type = other RNA
  modified_base 1..3: mod_base = OTHER; note = 2'O-Methyl ribonucleotide
  modified_base 1..3: mod_base = OTHER; note = Phosphorothioate linkage
  modified_base 108..110: mod_base = OTHER; note = 2'O-Methyl ribonucleotide
  modified_base 107..109: mod_base = OTHER; note = Phosphorothioate linkage

SEQ ID NO: 1447 - RNA, 110 nt, synthetic construct; identical to SEQ ID NO: 438
  source 1..110: mol_type = other RNA
  modified_base 1..3: mod_base = OTHER; note = 2'O-Methyl ribonucleotide
  modified_base 1..3: mod_base = OTHER; note = Phosphorothioate linkage
  modified_base 108..110: mod_base = OTHER; note = 2'O-Methyl ribonucleotide
  modified_base 107..109: mod_base = OTHER; note = Phosphorothioate linkage

SEQ ID NO: 1448 - RNA, 110 nt, synthetic construct; identical to SEQ ID NO: 439
  source 1..110: mol_type = other RNA
  modified_base 1..3: mod_base = OTHER; note = 2'O-Methyl ribonucleotide
  modified_base 1..3: mod_base = OTHER; note = Phosphorothioate linkage
  modified_base 108..110: mod_base = OTHER; note = 2'O-Methyl ribonucleotide
  modified_base 107..109: mod_base = OTHER; note = Phosphorothioate linkage

SEQ ID NO: 1449 - RNA, 110 nt, synthetic construct; identical to SEQ ID NO: 440
  source 1..110: mol_type = other RNA
  modified_base 1..3: mod_base = OTHER; note = 2'O-Methyl ribonucleotide
  modified_base 1..3: mod_base = OTHER; note = Phosphorothioate linkage
  modified_base 108..110: mod_base = OTHER; note = 2'O-Methyl ribonucleotide
  modified_base 107..109: mod_base = OTHER; note = Phosphorothioate linkage

SEQ ID NO: 1450 - RNA, 110 nt, synthetic construct; identical to SEQ ID NO: 441
  source 1..110: mol_type = other RNA
  modified_base 1..3: mod_base = OTHER; note = 2'O-Methyl ribonucleotide
  modified_base 1..3: mod_base = OTHER; note = Phosphorothioate linkage
  modified_base 108..110: mod_base = OTHER; note = 2'O-Methyl ribonucleotide
  modified_base 107..109: mod_base = OTHER; note = Phosphorothioate linkage

SEQ ID NO: 1451 - RNA, 110 nt, synthetic construct; identical to SEQ ID NO: 442
  source 1..110: mol_type = other RNA
  modified_base 1..3: mod_base = OTHER; note = 2'O-Methyl ribonucleotide
  modified_base 1..3: mod_base = OTHER; note = Phosphorothioate linkage
  modified_base 108..110: mod_base = OTHER; note = 2'O-Methyl ribonucleotide
  modified_base 107..109: mod_base = OTHER; note = Phosphorothioate linkage

SEQ ID NO: 1452 - RNA, 110 nt, synthetic construct; identical to SEQ ID NO: 443
  source 1..110: mol_type = other RNA
  modified_base 1..3: mod_base = OTHER; note = 2'O-Methyl ribonucleotide
  modified_base 1..3: mod_base = OTHER; note = Phosphorothioate linkage
  modified_base 108..110: mod_base = OTHER; note = 2'O-Methyl ribonucleotide
  modified_base 107..109: mod_base = OTHER; note = Phosphorothioate linkage

SEQ ID NO: 1453 - RNA, 110 nt, synthetic construct; identical to SEQ ID NO: 444
  source 1..110: mol_type = other RNA
  modified_base 1..3: mod_base = OTHER; note = 2'O-Methyl ribonucleotide
  modified_base 1..3: mod_base = OTHER; note = Phosphorothioate linkage
  modified_base 108..110: mod_base = OTHER; note = 2'O-Methyl ribonucleotide
  modified_base 107..109: mod_base = OTHER; note = Phosphorothioate linkage

SEQ ID NO: 1454 - RNA, 110 nt, synthetic construct; identical to SEQ ID NO: 445
  source 1..110: mol_type = other RNA
  modified_base 1..3: mod_base = OTHER; note = 2'O-Methyl ribonucleotide
  modified_base 1..3: mod_base = OTHER; note = Phosphorothioate linkage
  modified_base 108..110: mod_base = OTHER; note = 2'O-Methyl ribonucleotide
  modified_base 107..109: mod_base = OTHER; note = Phosphorothioate linkage

SEQ ID NO: 1455 - RNA, 110 nt, synthetic construct; identical to SEQ ID NO: 446
  source 1..110: mol_type = other RNA
  modified_base 1..3: mod_base = OTHER; note = 2'O-Methyl ribonucleotide
  modified_base 1..3: mod_base = OTHER; note = Phosphorothioate linkage
  modified_base 108..110: mod_base = OTHER; note = 2'O-Methyl ribonucleotide
  modified_base 107..109: mod_base = OTHER; note = Phosphorothioate linkage

SEQ ID NO: 1456 - RNA, 110 nt, synthetic construct; identical to SEQ ID NO: 447
  source 1..110: mol_type = other RNA
  modified_base 1..3: mod_base = OTHER; note = 2'O-Methyl ribonucleotide
  modified_base 1..3: mod_base = OTHER; note = Phosphorothioate linkage
  modified_base 108..110: mod_base = OTHER; note = 2'O-Methyl ribonucleotide
  modified_base 107..109: mod_base = OTHER; note = Phosphorothioate linkage

SEQ ID NO: 1457 - RNA, 110 nt, synthetic construct; identical to SEQ ID NO: 448
  source 1..110: mol_type = other RNA
  modified_base 1..3: mod_base = OTHER; note = 2'O-Methyl ribonucleotide
  modified_base 1..3: mod_base = OTHER; note = Phosphorothioate linkage
  modified_base 108..110: mod_base = OTHER; note = 2'O-Methyl ribonucleotide
  modified_base 107..109: mod_base = OTHER; note = Phosphorothioate linkage

SEQ ID NO: 1458 - RNA, 110 nt, synthetic construct; identical to SEQ ID NO: 449
  source 1..110: mol_type = other RNA
  modified_base 1..3: mod_base = OTHER; note = 2'O-Methyl ribonucleotide
  modified_base 1..3: mod_base = OTHER; note = Phosphorothioate linkage
  modified_base 108..110: mod_base = OTHER; note = 2'O-Methyl ribonucleotide
  modified_base 107..109: mod_base = OTHER; note = Phosphorothioate linkage

SEQ ID NO: 1459 - RNA, 110 nt, synthetic construct; identical to SEQ ID NO: 450
  source 1..110: mol_type = other RNA
  modified_base 1..3: mod_base = OTHER; note = 2'O-Methyl ribonucleotide
  modified_base 1..3: mod_base = OTHER; note = Phosphorothioate linkage
  modified_base 108..110: mod_base = OTHER; note = 2'O-Methyl ribonucleotide
  modified_base 107..109: mod_base = OTHER; note = Phosphorothioate linkage

SEQ ID NO: 1460 - RNA, 110 nt, synthetic construct; identical to SEQ ID NO: 451
  source 1..110: mol_type = other RNA
  modified_base 1..3: mod_base = OTHER; note = 2'O-Methyl ribonucleotide
  modified_base 1..3: mod_base = OTHER; note = Phosphorothioate linkage
  modified_base 108..110: mod_base = OTHER; note = 2'O-Methyl ribonucleotide
  modified_base 107..109: mod_base = OTHER; note = Phosphorothioate linkage

SEQ ID NO: 1461 - RNA, 110 nt, synthetic construct; identical to SEQ ID NO: 452
  source 1..110: mol_type = other RNA
  modified_base 1..3: mod_base = OTHER; note = 2'O-Methyl ribonucleotide
  modified_base 1..3: mod_base = OTHER; note = Phosphorothioate linkage
  modified_base 108..110: mod_base = OTHER; note = 2'O-Methyl ribonucleotide
  modified_base 107..109: mod_base = OTHER; note = Phosphorothioate linkage

SEQ ID NO: 1462 - RNA, 110 nt, synthetic construct; identical to SEQ ID NO: 453
  source 1..110: mol_type = other RNA
  modified_base 1..3: mod_base = OTHER; note = 2'O-Methyl ribonucleotide
  modified_base 1..3: mod_base = OTHER; note = Phosphorothioate linkage
  modified_base 108..110: mod_base = OTHER; note = 2'O-Methyl ribonucleotide
  modified_base 107..109: mod_base = OTHER; note = Phosphorothioate linkage

SEQ ID NO: 1463 - RNA, 110 nt, synthetic construct; identical to SEQ ID NO: 454
  source 1..110: mol_type = other RNA
  modified_base 1..3: mod_base = OTHER; note = 2'O-Methyl ribonucleotide
  modified_base 1..3: mod_base = OTHER; note = Phosphorothioate linkage
  modified_base 108..110: mod_base = OTHER; note = 2'O-Methyl ribonucleotide
  modified_base 107..109: mod_base = OTHER; note = Phosphorothioate linkage

SEQ ID NO: 1464 - RNA, 110 nt, synthetic construct; identical to SEQ ID NO: 455
  source 1..110: mol_type = other RNA
  modified_base 1..3: mod_base = OTHER; note = 2'O-Methyl ribonucleotide
  modified_base 1..3: mod_base = OTHER; note = Phosphorothioate linkage
  modified_base 108..110: mod_base = OTHER; note = 2'O-Methyl ribonucleotide
  modified_base 107..109: mod_base = OTHER; note = Phosphorothioate linkage

SEQ ID NO: 1465 - RNA, 110 nt, synthetic construct; identical to SEQ ID NO: 456
  source 1..110: mol_type = other RNA
  modified_base 1..3: mod_base = OTHER; note = 2'O-Methyl ribonucleotide
  modified_base 1..3: mod_base = OTHER; note = Phosphorothioate linkage
  modified_base 108..110: mod_base = OTHER; note = 2'O-Methyl ribonucleotide
  modified_base 107..109: mod_base = OTHER; note = Phosphorothioate linkage

SEQ ID NO: 1466 - RNA, 110 nt, synthetic construct; identical to SEQ ID NO: 457
  source 1..110: mol_type = other RNA
  modified_base 1..3: mod_base = OTHER; note = 2'O-Methyl ribonucleotide
  modified_base 1..3: mod_base = OTHER; note = Phosphorothioate linkage
  modified_base 108..110: mod_base = OTHER; note = 2'O-Methyl ribonucleotide
  modified_base 107..109: mod_base = OTHER; note = Phosphorothioate linkage

SEQ ID NO: 1467 - RNA, 110 nt, synthetic construct; identical to SEQ ID NO: 458
  source 1..110: mol_type = other RNA
  modified_base 1..3: mod_base = OTHER; note = 2'O-Methyl ribonucleotide
  modified_base 1..3: mod_base = OTHER; note = Phosphorothioate linkage
  modified_base 108..110: mod_base = OTHER; note = 2'O-Methyl ribonucleotide
  modified_base 107..109: mod_base = OTHER; note = Phosphorothioate linkage

SEQ ID NO: 1468 - RNA, 110 nt, synthetic construct; identical to SEQ ID NO: 459
  source 1..110: mol_type = other RNA
  modified_base 1..3: mod_base = OTHER; note = 2'O-Methyl ribonucleotide
  modified_base 1..3: mod_base = OTHER; note = Phosphorothioate linkage
  modified_base 108..110: mod_base = OTHER; note = 2'O-Methyl ribonucleotide
  modified_base 107..109: mod_base = OTHER; note = Phosphorothioate linkage

SEQ ID NO: 1469 - RNA, 110 nt, synthetic construct; identical to SEQ ID NO: 460
  source 1..110: mol_type = other RNA
  modified_base 1..3: mod_base = OTHER; note = 2'O-Methyl ribonucleotide
  modified_base 1..3: mod_base = OTHER; note = Phosphorothioate linkage
  modified_base 108..110: mod_base = OTHER; note = 2'O-Methyl ribonucleotide
  modified_base 107..109: mod_base = OTHER; note = Phosphorothioate linkage

SEQ ID NO: 1470 - RNA, 110 nt, synthetic construct; identical to SEQ ID NO: 461
  source 1..110: mol_type = other RNA
  modified_base 1..3: mod_base = OTHER; note = 2'O-Methyl ribonucleotide
  modified_base 1..3: mod_base = OTHER; note = Phosphorothioate linkage
  modified_base 108..110: mod_base = OTHER; note = 2'O-Methyl ribonucleotide
  modified_base 107..109: mod_base = OTHER; note = Phosphorothioate linkage

SEQ ID NO: 1471 - RNA, 110 nt, synthetic construct; identical to SEQ ID NO: 462
  source 1..110: mol_type = other RNA
  modified_base 1..3: mod_base = OTHER; note = 2'O-Methyl ribonucleotide
  modified_base 1..3: mod_base = OTHER; note = Phosphorothioate linkage
  modified_base 108..110: mod_base = OTHER; note = 2'O-Methyl ribonucleotide
  modified_base 107..109: mod_base = OTHER; note = Phosphorothioate linkage

SEQ ID NO: 1472 - RNA, 110 nt, synthetic construct; identical to SEQ ID NO: 463
  source 1..110: mol_type = other RNA
  modified_base 1..3: mod_base = OTHER; note = 2'O-Methyl ribonucleotide
  modified_base 1..3: mod_base = OTHER; note = Phosphorothioate linkage
  modified_base 108..110: mod_base = OTHER; note = 2'O-Methyl ribonucleotide
  modified_base 107..109: mod_base = OTHER; note = Phosphorothioate linkage

SEQ ID NO: 1473 - RNA, 110 nt, synthetic construct; identical to SEQ ID NO: 464
  source 1..110: mol_type = other RNA
  modified_base 1..3: mod_base = OTHER; note = 2'O-Methyl ribonucleotide
  modified_base 1..3: mod_base = OTHER; note = Phosphorothioate linkage
  modified_base 108..110: mod_base = OTHER; note = 2'O-Methyl ribonucleotide
  modified_base 107..109: mod_base = OTHER; note = Phosphorothioate linkage

SEQ ID NO: 1474 - RNA, 110 nt, synthetic construct; identical to SEQ ID NO: 465
  source 1..110: mol_type = other RNA
  modified_base 1..3: mod_base = OTHER; note = 2'O-Methyl ribonucleotide
  modified_base 1..3: mod_base = OTHER; note = Phosphorothioate linkage
  modified_base 108..110: mod_base = OTHER; note = 2'O-Methyl ribonucleotide
  modified_base 107..109: mod_base = OTHER; note = Phosphorothioate linkage

SEQ ID NO: 1475 - RNA, 110 nt, synthetic construct; identical to SEQ ID NO: 466
  source 1..110: mol_type = other RNA
  modified_base 1..3: mod_base = OTHER; note = 2'O-Methyl ribonucleotide
  modified_base 1..3: mod_base = OTHER; note = Phosphorothioate linkage
  modified_base 108..110: mod_base = OTHER; note = 2'O-Methyl ribonucleotide
  modified_base 107..109: mod_base = OTHER; note = Phosphorothioate linkage

SEQ ID NO: 1476 - RNA, 110 nt, synthetic construct; identical to SEQ ID NO: 467
  source 1..110: mol_type = other RNA
  modified_base 1..3: mod_base = OTHER; note = 2'O-Methyl ribonucleotide
  modified_base 1..3: mod_base = OTHER; note = Phosphorothioate linkage
  modified_base 108..110: mod_base = OTHER; note = 2'O-Methyl ribonucleotide
  modified_base 107..109: mod_base = OTHER; note = Phosphorothioate linkage

SEQ ID NO: 1477 - RNA, 110 nt, synthetic construct; identical to SEQ ID NO: 468
  source 1..110: mol_type = other RNA
  modified_base 1..3: mod_base = OTHER; note = 2'O-Methyl ribonucleotide
  modified_base 1..3: mod_base = OTHER; note = Phosphorothioate linkage
  modified_base 108..110: mod_base = OTHER; note = 2'O-Methyl ribonucleotide
  modified_base 107..109: mod_base = OTHER; note = Phosphorothioate linkage

SEQ ID NO: 1478 - RNA, 110 nt, synthetic construct; identical to SEQ ID NO: 469
  source 1..110: mol_type = other RNA
  modified_base 1..3: mod_base = OTHER; note = 2'O-Methyl ribonucleotide
  modified_base 1..3: mod_base = OTHER; note = Phosphorothioate linkage
  modified_base 108..110: mod_base = OTHER; note = 2'O-Methyl ribonucleotide
  modified_base 107..109: mod_base = OTHER; note = Phosphorothioate linkage

SEQ ID NO: 1479 - RNA, 110 nt, synthetic construct; identical to SEQ ID NO: 470
  source 1..110: mol_type = other RNA
  modified_base 1..3: mod_base = OTHER; note = 2'O-Methyl ribonucleotide
  modified_base 1..3: mod_base = OTHER; note = Phosphorothioate linkage
  modified_base 108..110: mod_base = OTHER; note = 2'O-Methyl ribonucleotide
  modified_base 107..109: mod_base = OTHER; note = Phosphorothioate linkage

SEQ ID NO: 1480 - RNA, 110 nt, synthetic construct; identical to SEQ ID NO: 471
  source 1..110: mol_type = other RNA
  modified_base 1..3: mod_base = OTHER; note = 2'O-Methyl ribonucleotide
  modified_base 1..3: mod_base = OTHER; note = Phosphorothioate linkage
  modified_base 108..110: mod_base = OTHER; note = 2'O-Methyl ribonucleotide
  modified_base 107..109: mod_base = OTHER; note = Phosphorothioate linkage

SEQ ID NO: 1481 - RNA, 110 nt, synthetic construct; identical to SEQ ID NO: 472
  source 1..110: mol_type = other RNA
  modified_base 1..3: mod_base = OTHER; note = 2'O-Methyl ribonucleotide
  modified_base 1..3: mod_base = OTHER; note = Phosphorothioate linkage
  modified_base 108..110: mod_base = OTHER; note = 2'O-Methyl ribonucleotide
  modified_base 107..109: mod_base = OTHER; note = Phosphorothioate linkage

SEQ ID NO: 1482 - RNA, 110 nt, synthetic construct; identical to SEQ ID NO: 473
  source 1..110: mol_type = other RNA
  modified_base 1..3: mod_base = OTHER; note = 2'O-Methyl ribonucleotide
  modified_base 1..3: mod_base = OTHER; note = Phosphorothioate linkage
  modified_base 108..110: mod_base = OTHER; note = 2'O-Methyl ribonucleotide
  modified_base 107..109: mod_base = OTHER; note = Phosphorothioate linkage

SEQ ID NO: 1483 - RNA, 110 nt, synthetic construct; identical to SEQ ID NO: 474
  source 1..110: mol_type = other RNA
  modified_base 1..3: mod_base = OTHER; note = 2'O-Methyl ribonucleotide
  modified_base 1..3: mod_base = OTHER; note = Phosphorothioate linkage
  modified_base 108..110: mod_base = OTHER; note = 2'O-Methyl ribonucleotide
  modified_base 107..109: mod_base = OTHER; note = Phosphorothioate linkage

SEQ ID NO: 1484 - RNA, 110 nt, synthetic construct; identical to SEQ ID NO: 475
  source 1..110: mol_type = other RNA
  modified_base 1..3: mod_base = OTHER; note = 2'O-Methyl ribonucleotide
  modified_base 1..3: mod_base = OTHER; note = Phosphorothioate linkage
  modified_base 108..110: mod_base = OTHER; note = 2'O-Methyl ribonucleotide
  modified_base 107..109: mod_base = OTHER; note = Phosphorothioate linkage

SEQ ID NO: 1485 - RNA, 110 nt, synthetic construct; identical to SEQ ID NO: 476
  source 1..110: mol_type = other RNA
  modified_base 1..3: mod_base = OTHER; note = 2'O-Methyl ribonucleotide
  modified_base 1..3: mod_base = OTHER; note = Phosphorothioate linkage
  modified_base 108..110: mod_base = OTHER; note = 2'O-Methyl ribonucleotide
  modified_base 107..109: mod_base = OTHER; note = Phosphorothioate linkage

SEQ ID NO: 1486 - RNA, 110 nt, synthetic construct; identical to SEQ ID NO: 477
  source 1..110: mol_type = other RNA
  modified_base 1..3: mod_base = OTHER; note = 2'O-Methyl ribonucleotide
  modified_base 1..3: mod_base = OTHER; note = Phosphorothioate linkage
  modified_base 108..110: mod_base = OTHER; note = 2'O-Methyl ribonucleotide
  modified_base 107..109: mod_base = OTHER; note = Phosphorothioate linkage

SEQ ID NO: 1487 - RNA, 110 nt, synthetic construct; identical to SEQ ID NO: 417
  source 1..110: mol_type = other RNA
  modified_base 1..3: mod_base = OTHER; note = 2'O-Methyl ribonucleotide
  modified_base 1..3: mod_base = OTHER; note = Phosphorothioate linkage
  modified_base 108..110: mod_base = OTHER; note = 2'O-Methyl ribonucleotide
  modified_base 107..109: mod_base = OTHER; note = Phosphorothioate linkage

SEQ ID NO: 1488 - RNA, 110 nt, synthetic construct; identical to SEQ ID NO: 418
  source 1..110: mol_type = other RNA
  modified_base 1..3: mod_base = OTHER; note = 2'O-Methyl ribonucleotide
  modified_base 1..3: mod_base = OTHER; note = Phosphorothioate linkage
  modified_base 108..110: mod_base = OTHER; note = 2'O-Methyl ribonucleotide
  modified_base 107..109: mod_base = OTHER; note = Phosphorothioate linkage

SEQ ID NO: 1489 - RNA, 110 nt, synthetic construct; identical to SEQ ID NO: 419
  source 1..110: mol_type = other RNA
  modified_base 1..3: mod_base = OTHER; note = 2'O-Methyl ribonucleotide
  modified_base 1..3: mod_base = OTHER; note = Phosphorothioate linkage
  modified_base 108..110: mod_base = OTHER; note = 2'O-Methyl ribonucleotide
  modified_base 107..109: mod_base = OTHER; note = Phosphorothioate linkage

SEQ ID NO: 1490 - DNA, 22 bp, Homo sapiens
  source 1..22: mol_type = genomic DNA
ttgttcctctagttatttcctc

SEQ ID NO: 1491 - DNA, 22 bp, Homo sapiens
  source 1..22: mol_type = genomic DNA
atttgattctctatctccagag

SEQ ID NO: 1492 - DNA, 22 bp, Homo sapiens
  source 1..22: mol_type = genomic DNA
tttgattctctatctccagagc

SEQ ID NO: 1493 - DNA, 22 bp, Homo sapiens
  source 1..22: mol_type = genomic DNA
aagatttgctatgttagacgat

SEQ ID NO: 1494 - DNA, 22 bp, Homo sapiens
  source 1..22: mol_type = genomic DNA
agatttgctatgttagacgatg

SEQ ID NO: 1495 - DNA, 22 bp, Homo sapiens
  source 1..22: mol_type = genomic DNA
gatttgctatgttagacgatgt

SEQ ID NO: 1496 - DNA, 22 bp, Homo sapiens
  source 1..22: mol_type = genomic DNA
actttgtccataagacgaaggg

SEQ ID NO: 1497 - DNA, 22 bp, Homo sapiens
  source 1..22: mol_type = genomic DNA
agggccaaattaatgacatatt

SEQ ID NO: 1498 - DNA, 22 bp, Homo sapiens
  source 1..22: mol_type = genomic DNA
gggccaaattaatgacatattt

SEQ ID NO: 1499 - DNA, 22 bp, Homo sapiens
  source 1..22: mol_type = genomic DNA
tatgatctatcgctgcaaacca

SEQ ID NO: 1500 - DNA, 22 bp, Homo sapiens
  source 1..22: mol_type = genomic DNA
atgatctatcgctgcaaaccag

SEQ ID NO: 1501 - DNA, 22 bp, Homo sapiens
  source 1..22: mol_type = genomic DNA
caaaccagtgaaatcaaagaag

SEQ ID NO: 1502 - DNA, 22 bp, Homo sapiens
  source 1..22: mol_type = genomic DNA
aaaccagtgaaatcaaagaaga

SEQ ID NO: 1503 - DNA, 22 bp, Homo sapiens
  source 1..22: mol_type = genomic DNA
acaagtcaaaaatgaagaggta

SEQ ID NO: 1504 - DNA, 22 bp, Homo sapiens
  source 1..22: mol_type = genomic DNA
gaatatgtcacttgaactcaac

SEQ ID NO: 1505 - DNA, 22 bp, Homo sapiens
  source 1..22: mol_type = genomic DNA
tcacttgaactcaactcaaaac

SEQ ID NO: 1506 - DNA, 22 bp, Homo sapiens
  source 1..22: mol_type = genomic DNA
tcaaaacttgaaagcctcctag

SEQ ID NO: 1507 - DNA, 22 bp, Homo sapiens
  source 1..22: mol_type = genomic DNA
caaaacttgaaagcctcctaga

SEQ ID NO: 1508 - DNA, 22 bp, Homo sapiens
  source 1..22: mol_type = genomic DNA
aaaacttgaaagcctcctagaa

SEQ ID NO: 1509 - DNA, 22 bp, Homo sapiens
  source 1..22: mol_type = genomic DNA
aaacttgaaagcctcctagaag

SEQ ID NO: 1510 - DNA, 22 bp, Homo sapiens
  source 1..22: mol_type = genomic DNA
aacttgaaagcctcctagaaga

SEQ ID NO: 1511 - DNA, 22 bp, Homo sapiens
  source 1..22: mol_type = genomic DNA
gttctggagtttcaggttgatt

SEQ ID NO: 1512 - DNA, 22 bp, Homo sapiens
  source 1..22: mol_type = genomic DNA
cactggtttgcagcgatagatc

SEQ ID NO: 1513 - DNA, 22 bp, Homo sapiens
  source 1..22: mol_type = genomic DNA
actggtttgcagcgatagatca

SEQ ID NO: 1514 - DNA, 22 bp, Homo sapiens
  source 1..22: mol_type = genomic DNA
cgatagatcataaaaagactga

SEQ ID NO: 1515 - DNA, 22 bp, Homo sapiens
  source 1..22: mol_type = genomic DNA
cccaactgaaggaggccattgg

SEQ ID NO: 1516 - DNA, 22 bp, Homo sapiens
  source 1..22: mol_type = genomic DNA
ccaactgaaggaggccattggc

SEQ ID NO: 1517 - DNA, 22 bp, Homo sapiens
  source 1..22: mol_type = genomic DNA
cttgattttggctctggagata

SEQ ID NO: 1518 - DNA, 22 bp, Homo sapiens
  source 1..22: mol_type = genomic DNA
ttttggctctggagatagagaa

SEQ ID NO: 1519 - DNA, 22 bp, Homo sapiens
  source 1..22: mol_type = genomic DNA
tctggagatagagaatcaaatg

SEQ ID NO: 1520 - DNA, 22 bp, Homo sapiens
  source 1..22: mol_type = genomic DNA
gaattgtcttgatcaattctgg

SEQ ID NO: 1521 - DNA, 22 bp, Homo sapiens
  source 1..22: mol_type = genomic DNA
aattgtcttgatcaattctgga

SEQ ID NO: 1522 - DNA, 22 bp, Homo sapiens
  source 1..22: mol_type = genomic DNA
ggaggaaataactagaggaaca

SEQ ID NO: 1523 - DNA, 22 bp, Homo sapiens
  source 1..22: mol_type = genomic DNA
gaggaaataactagaggaacaa

SEQ ID NO: 1524 - DNA, 22 bp, Homo sapiens
  source 1..22: mol_type = genomic DNA
actctctatatccagacttttg

SEQ ID NO: 1525 - DNA, 22 bp, Homo sapiens
  source 1..22: mol_type = genomic DNA
ctctctatatccagacttttgt

SEQ ID NO: 1526 - DNA, 22 bp, Homo sapiens
  source 1..22: mol_type = genomic DNA
tctctatatccagacttttgta

SEQ ID NO: 1527 - DNA, 22 bp, Homo sapiens
  source 1..22: mol_type = genomic DNA
aacaattaaaccaacagcatag

SEQ ID NO: 1528 - DNA, 22 bp, Homo sapiens
  source 1..22: mol_type = genomic DNA
attaaaccaacagcatagtcaa

SEQ ID NO: 1529 - DNA, 22 bp, Homo sapiens
  source 1..22: mol_type = genomic DNA
aaccaacagcatagtcaaataa

SEQ ID NO: 1530 - DNA, 22 bp, Homo sapiens
  source 1..22: mol_type = genomic DNA
accaacagcatagtcaaataaa

SEQ ID NO: 1531 - DNA, 22 bp, Homo sapiens
  source 1..22: mol_type = genomic DNA
gatgctattatcttgtttttct

SEQ ID NO: 1532 - DNA, 22 bp, Homo sapiens
  source 1..22: mol_type = genomic DNA
aggactagtattcaagaaccca

SEQ ID NO: 1533 - DNA, 22 bp, Homo sapiens
  source 1..22: mol_type = genomic DNA
ggactagtattcaagaacccac

SEQ ID NO: 1534 - DNA, 22 bp, Homo sapiens
  source 1..22: mol_type = genomic DNA
aagaactactccctttcttcag

SEQ ID NO: 1535 - DNA, 22 bp, Homo sapiens
  source 1..22: mol_type = genomic DNA
actactccctttcttcagttga

SEQ ID NO: 1536 - DNA, 22 bp, Homo sapiens
  source 1..22: mol_type = genomic DNA
ctactccctttcttcagttgaa

SEQ ID NO: 1537 - DNA, 22 bp, Homo sapiens
  source 1..22: mol_type = genomic DNA
cctttcttcagttgaatgaaat

SEQ ID NO: 1538 - DNA, 22 bp, Homo sapiens
  source 1..22: mol_type = genomic DNA
ggtgctcttggcttggaagata

SEQ ID NO: 1539 - DNA, 22 bp, Homo sapiens
  source 1..22: mol_type = genomic DNA
gtgctcttggcttggaagatag

SEQ ID NO: 1540 - DNA, 22 bp, Homo sapiens
  source 1..22: mol_type = genomic DNA
atagagaaatttctgtgggttc

SEQ ID NO: 1541 - DNA, 22 bp, Homo sapiens
  source 1..22: mol_type = genomic DNA
gaatactagtccttctgagctg

SEQ ID NO: 1542 - DNA, 22 bp, Homo sapiens
  source 1..22: mol_type = genomic DNA
ttattgattctaggcattcctg

SEQ ID NO: 1543 - DNA, 22 bp, Homo sapiens
  source 1..22: mol_type = genomic DNA
gtctactgtgatgttatatcag

SEQ ID NO: 1544 - DNA, 22 bp, Homo sapiens
  source 1..22: mol_type = genomic DNA
ctgatataacatcacagtagac

SEQ ID NO: 1545 - DNA, 22 bp, Homo sapiens
  source 1..22: mol_type = genomic DNA
tgatataacatcacagtagaca

SEQ ID NO: 1546 - DNA, 22 bp, Homo sapiens
  source 1..22: mol_type = genomic DNA
gatataacatcacagtagacat

SEQ ID NO: 1547 - DNA, 22 bp, Homo sapiens
  source 1..22: mol_type = genomic DNA
cacttgtatgttcacctctgtt

SEQ ID NO: 1548 - DNA, 22 bp, Homo sapiens
  source 1..22: mol_type = genomic DNA
tataaatggtggtacattcagc

SEQ ID NO: 1549 - DNA, 22 bp, Homo sapiens
  source 1..22: mol_type = genomic DNA
tggtacattcagcaggaatgcc

SEQ ID NO: 1550 - DNA, 22 bp, Homo sapiens
  source 1..22: mol_type = genomic DNA
gtccatggacattaattcaaca

SEQ ID NO: 1551 - DNA, 22 bp, Homo sapiens
  source 1..22: mol_type = genomic DNA
ttcaacatcgaatagatggatc

SEQ ID NO: 1552 - DNA, 22 bp, Homo sapiens
  source 1..22: mol_type = genomic DNA
atagatggatcacaaaacttca

SEQ ID NO: 1553 - DNA, 22 bp, Homo sapiens
  source 1..22: mol_type = genomic DNA
ttcaatgaaacgtgggagaact

SEQ ID NO: 1554 - DNA, 22 bp, Homo sapiens
  source 1..22: mol_type = genomic DNA
agtccccttaccatcaagcctc

SEQ ID NO: 1555 - DNA, 22 bp, Homo sapiens
  source 1..22: mol_type = genomic DNA
tttgtgatccatctattcgatg

SEQ ID NO: 1556 - DNA, 22 bp, Homo sapiens
  source 1..22: mol_type = genomic DNA
tgaattaatgtccatggactac

SEQ ID NO: 1557 - DNA, 22 bp, Homo sapiens
  source 1..22: mol_type = genomic DNA
tttacgaattgagttggaagac

SEQ ID NO: 1558 - DNA, 22 bp, Homo sapiens
  source 1..22: mol_type = genomic DNA
ggcaatgtccccaatgcaatcc

SEQ ID NO: 1559 - DNA, 22 bp, Homo sapiens
  source 1..22: mol_type = genomic DNA
gcaatgtccccaatgcaatccc

SEQ ID NO: 1560 - DNA, 22 bp, Homo sapiens
  source 1..22: mol_type = genomic DNA
gttttctacttgggatcacaaa

SEQ ID NO: 1561 - DNA, 22 bp, Homo sapiens
  source 1..22: mol_type = genomic DNA
ccttttgctttgtgatcccaag

SEQ ID NO: 1562 - DNA, 22 bp, Homo sapiens
  source 1..22: mol_type = genomic DNA
cttttgctttgtgatcccaagt

SEQ ID NO: 1563 - DNA, 22 bp, Homo sapiens
  source 1..22: mol_type = genomic DNA
ttgtgatcccaagtagaaaaca

SEQ ID NO: 1564 - DNA, 22 bp, Homo sapiens
  source 1..22: mol_type = genomic DNA
agttggtttcgtgatttcccaa

SEQ ID NO: 1565 - DNA, 22 bp, Homo sapiens
  source 1..22: mol_type = genomic DNA
gttggtttcgtgatttcccaag

SEQ ID NO: 1566 - DNA, 22 bp, Homo sapiens
  source 1..22: mol_type = genomic DNA
gtttcgtgatttcccaagtaaa

SEQ ID NO: 1567 - DNA, 22 bp, Homo sapiens
  source 1..22: mol_type = genomic DNA
ttccagtcttccaactcaattc

SEQ ID NO: 1568 - DNA, 22 bp, Homo sapiens
  source 1..22: mol_type = genomic DNA
agtatatcttctctaggcccaa

SEQ ID NO: 1569 - DNA, 22 bp, Homo sapiens
  source 1..22: mol_type = genomic DNA
gtatatcttctctaggcccaac

SEQ ID NO: 1570 - DNA, 22 bp, Homo sapiens
  source 1..22: mol_type = genomic DNA
tctaggcccaaccaaaattctc

SEQ ID NO: 1571 - DNA, 22 bp, Homo sapiens
  source 1..22: mol_type = genomic DNA
ctaggcccaaccaaaattctcc

SEQ ID NO: 1572 - DNA, 22 bp, Homo sapiens
  source 1..22: mol_type = genomic DNA
gcccaaccaaaattctcctgaa

SEQ ID NO: 1573 - DNA, 22 bp, Homo sapiens
  source 1..22: mol_type = genomic DNA
tggtggtggcatgatgagtgtg

SEQ ID NO: 1574 - DNA, 22 bp, Homo sapiens
  source 1..22: mol_type = genomic DNA
ggtggtggcatgatgagtgtgg

SEQ ID NO: 1575 - DNA, 22 bp, Homo sapiens
  source 1..22: mol_type = genomic DNA
tgatgagtgtggagaaaacaac

SEQ ID NO: 1576 - DNA, 22 bp, Homo sapiens
  source 1..22: mol_type = genomic DNA
tgtggagaaaacaacctaaatg

SEQ ID NO: 1577 - DNA, 22 bp, Homo sapiens
  source 1..22: mol_type = genomic DNA
ggtaaatataacaaaccaagag

SEQ ID NO: 1578 - DNA, 22 bp, Homo sapiens
  source 1..22: mol_type = genomic DNA
gaagaggattatcttggaagtc

SEQ ID NO: 1579 - DNA, 22 bp, Homo sapiens
  source 1..22: mol_type = genomic DNA
aagaggattatcttggaagtct

SEQ ID NO: 1580 - DNA, 22 bp, Homo sapiens
  source 1..22: mol_type = genomic DNA
tcaaaatggaaggttatactct

SEQ ID NO: 1581 - DNA, 22 bp, Homo sapiens
  source 1..22: mol_type = genomic DNA
caaaatggaaggttatactcta

SEQ ID NO: 1582 - DNA, 22 bp, Homo sapiens
  source 1..22: mol_type = genomic DNA
atgttgatccatccaacagatt

SEQ ID NO: 1583 - DNA, 22 bp, Homo sapiens
  source 1..22: mol_type = genomic DNA
catccaacagattcagaaagct

SEQ ID NO: 1584 - DNA, 22 bp, Homo sapiens
  source 1..22: mol_type = genomic DNA
gcctcagttcattcaaagcttt

SEQ ID NO: 1585 - DNA, 22 bp, Homo sapiens
  source 1..22: mol_type = genomic DNA
actctctatatccagacttttg

SEQ ID NO: 1586 - DNA, 22 bp, Homo sapiens
  source 1..22: mol_type = genomic DNA
ctctctatatccagacttttgt

SEQ ID NO: 1587 - DNA, 22 bp, Homo sapiens
  source 1..22: mol_type = genomic DNA
tctctatatccagacttttgta

SEQ ID NO: 1588 - RNA, 110 nt, synthetic construct
  source 1..110: mol_type = other RNA
  modified_base 1..3: mod_base = OTHER; note = 2'O-Methyl ribonucleotide
  modified_base 1..3: mod_base = OTHER; note = Phosphorothioate linkage
  modified_base 108..110: mod_base = OTHER; note = 2'O-Methyl ribonucleotide
  modified_base 107..109: mod_base = OTHER; note = Phosphorothioate linkage
atgtggagctgtggcccactcagttgagaatcgaaagattcttaataaggcatccttccgatgctgacttctcaccgtccgttttccaataggagcgggcggtatgtttt

SEQ ID NO: 1589 - RNA, 110 nt, synthetic construct
  source 1..110: mol_type = other RNA
  modified_base 1..3: mod_base = OTHER; note = 2'O-Methyl ribonucleotide
  modified_base 1..3: mod_base = OTHER; note = Phosphorothioate linkage
  modified_base 108..110: mod_base = OTHER; note = 2'O-Methyl ribonucleotide
  modified_base 107..109: mod_base = OTHER; note = Phosphorothioate linkage
gggcaggggtccctgtgagcttgttgagaatcgaaagattcttaataaggcatccttccgatgctgacttctcaccgtccgttttccaataggagcgggcggtatgtttt

SEQ ID NO: 1590 - RNA, 110 nt, synthetic construct
  source 1..110: mol_type = other RNA
  modified_base 1..3: mod_base = OTHER; note = 2'O-Methyl ribonucleotide
  modified_base 1..3: mod_base = OTHER; note = Phosphorothioate linkage
  modified_base 108..110: mod_base = OTHER; note = 2'O-Methyl ribonucleotide
  modified_base 107..109: mod_base = OTHER; note = Phosphorothioate linkage
gtgctggccaacctggccagcagttgagaatcgaaagattcttaataaggcatccttccgatgctgacttctcaccgtccgttttccaataggagcgggcggtatgtttt

SEQ ID NO: 1591 - RNA, 110 nt, synthetic construct
  source 1..110: mol_type = other RNA
  modified_base 1..3: mod_base = OTHER; note = 2'O-Methyl ribonucleotide
  modified_base 1..3: mod_base = OTHER; note = Phosphorothioate linkage
  modified_base 108..110: mod_base = OTHER; note = 2'O-Methyl ribonucleotide
  modified_base 107..109: mod_base = OTHER; note = Phosphorothioate linkage
ctggccaacctggccagcaagagttgagaatcgaaagattcttaataaggcatccttccgatgctgacttctcaccgtccgttttccaataggagcgggcggtatgtttt

SEQ ID NO: 1592 - RNA, 110 nt, synthetic construct
  source 1..110: mol_type = other RNA
  modified_base 1..3: mod_base = OTHER; note = 2'O-Methyl ribonucleotide
  modified_base 1..3: mod_base = OTHER; note = Phosphorothioate linkage
  modified_base 108..110: mod_base = OTHER; note = 2'O-Methyl ribonucleotide
  modified_base 107..109: mod_base = OTHER; note = Phosphorothioate linkage
aacctggccagcaagaacaccagttgagaatcgaaagattcttaataaggcatccttccgatgctgacttctcaccgtccgttttccaataggagcgggcggtatgtttt

SEQ ID NO: 1593 - RNA, 110 nt, synthetic construct
  source 1..110: mol_type = other RNA
  modified_base 1..3: mod_base = OTHER; note = 2'O-Methyl ribonucleotide
  modified_base 1..3: mod_base = OTHER; note = Phosphorothioate linkage
  modified_base 108..110: mod_base = OTHER; note = 2'O-Methyl ribonucleotide
  modified_base 107..109: mod_base = OTHER; note = Phosphorothioate linkage
accatgcccgacgtgtacttcggttgagaatcgaaagattcttaataaggcatccttccgatgctgacttctcaccgtccgttttccaataggagcgggcggtatgtttt

SEQ ID NO: 1594 - RNA, 110 nt, synthetic construct
  source 1..110: mol_type = other RNA
  modified_base 1..3: mod_base = OTHER; note = 2'O-Methyl ribonucleotide
  modified_base 1..3: mod_base = OTHER; note = Phosphorothioate linkage
  modified_base 108..110: mod_base = OTHER; note = 2'O-Methyl ribonucleotide
  modified_base 107..109: mod_base = OTHER; note = Phosphorothioate linkage
ggccgtggcggggctggtgctcgttgagaatcgaaagattcttaataaggcatccttccgatgctgacttctcaccgtccgttttccaataggagcgggcggtatgtttt

SEQ ID NO: 1595 - RNA, 110 nt, synthetic construct
  source 1..110: mol_type = other RNA
  modified_base 1..3: mod_base = OTHER; note = 2'O-Methyl ribonucleotide
  modified_base 1..3: mod_base = OTHER; note = Phosphorothioate linkage
  modified_base 108..110: mod_base = OTHER; note = 2'O-Methyl ribonucleotide
  modified_base 107..109: mod_base = OTHER; note = Phosphorothioate linkage
ggcggggctggtgctcacggcagttgagaatcgaaagattcttaataaggcatccttccgatgctgacttctcaccgtccgttttccaataggagcgggcggtatgtttt

SEQ ID NO: 1596 - RNA, 110 nt, synthetic construct
  source 1..110: mol_type = other RNA
  modified_base 1..3: mod_base = OTHER; note = 2'O-Methyl ribonucleotide
  modified_base 1..3: mod_base = OTHER; note = Phosphorothioate linkage
  modified_base 108..110: mod_base = OTHER; note = 2'O-Methyl ribonucleotide
  modified_base 107..109: mod_base = OTHER; note = Phosphorothioate linkage
gagcctcagcagtgaggcccatgttgagaatcgaaagattcttaataaggcatccttccgatgctgacttctcaccgtccgttttccaataggagcgggcggtatgtttt

SEQ ID NO: 1597 - RNA, 110 nt, synthetic construct
  source 1..110: mol_type = other RNA
  modified_base 1..3: mod_base = OTHER; note = 2'O-Methyl ribonucleotide
  modified_base 1..3: mod_base = OTHER; note = Phosphorothioate linkage
  modified_base 108..110: mod_base = OTHER; note = 2'O-Methyl ribonucleotide
  modified_base 107..109: mod_base = OTHER; note = Phosphorothioate linkage
ctgttcaacgtggcttccctgggttgagaatcgaaagattcttaataaggcatccttccgatgctgacttctcaccgtccgttttccaataggagcgggcggtatgtttt

SEQ ID NO: 1598 - RNA, 110 nt, synthetic construct
  source 1..110: mol_type = other RNA
  modified_base 1..3: mod_base = OTHER; note = 2'O-Methyl ribonucleotide
  modified_base 1..3: mod_base = OTHER; note = Phosphorothioate linkage
  modified_base 108..110: mod_base = OTHER; note = 2'O-Methyl ribonucleotide
  modified_base 107..109: mod_base = OTHER; note = Phosphorothioate linkage
actccactgcactgctgagcctgttgagaatcgaaagattcttaataaggcatccttccgatgctgacttctcaccgtccgttttccaataggagcgggcggtatgtttt

SEQ ID NO: 1599 - RNA, 110 nt, synthetic construct
  source 1..110: mol_type = other RNA
  modified_base 1..3: mod_base = OTHER; note = 2'O-Methyl ribonucleotide
  modified_base 1..3: mod_base = OTHER; note = Phosphorothioate linkage
  modified_base 108..110: mod_base = OTHER; note = 2'O-Methyl ribonucleotide
  modified_base 107..109: mod_base = OTHER; note = Phosphorothioate linkage
ccactgcactgctgagccttgagttgagaatcgaaagattcttaataaggcatccttccgatgctgacttctcaccgtccgttttccaataggagcgggcggtatgtttt

SEQ ID NO: 1600 - RNA, 110 nt, synthetic construct
  source 1..110: mol_type = other RNA
  modified_base 1..3: mod_base = OTHER; note = 2'O-Methyl ribonucleotide
  modified_base 1..3: mod_base = OTHER; note = Phosphorothioate linkage
  modified_base 108..110: mod_base = OTHER; note = 2'O-Methyl ribonucleotide
  modified_base 107..109: mod_base = OTHER; note = Phosphorothioate linkage
tgactactacatcgagcgtgccgttgagaatcgaaagattcttaataaggcatccttccgatgctgacttctcaccgtccgttttccaataggagcgggcggtatgtttt

SEQ ID NO: 1601 - RNA, 110 nt, synthetic construct
  source 1..110: mol_type = other RNA
  modified_base 1..3: mod_base = OTHER; note = 2'O-Methyl ribonucleotide
  modified_base 1..3: mod_base = OTHER; note = Phosphorothioate linkage
  modified_base 108..110: mod_base = OTHER; note = 2'O-Methyl ribonucleotide
  modified_base 107..109: mod_base = OTHER; note = Phosphorothioate linkage
cgcacctacatggccagtgtgtgttgagaatcgaaagattcttaataaggcatccttccgatgctgacttctcaccgtccgttttccaataggagcgggcggtatgtttt

SEQ ID NO: 1602 - RNA, 110 nt, synthetic construct
  source 1..110: mol_type = other RNA
  modified_base 1..3: mod_base = OTHER; note = 2'O-Methyl ribonucleotide
  modified_base 1..3: mod_base = OTHER; note = Phosphorothioate linkage
  modified_base 108..110: mod_base = OTHER; note = 2'O-Methyl ribonucleotide
  modified_base 107..109: mod_base = OTHER; note = Phosphorothioate linkage
acatggccagtgtgtacaacacgttgagaatcgaaagattcttaataaggcatccttccgatgctgacttctcaccgtccgttttccaataggagcgggcggtatgtttt

SEQ ID NO: 1603 - RNA, 110 nt, synthetic construct
  source 1..110: mol_type = other RNA
  modified_base 1..3: mod_base = OTHER; note = 2'O-Methyl ribonucleotide
  modified_base 1..3: mod_base = OTHER; note = Phosphorothioate linkage
  modified_base 108..110: mod_base = OTHER; note = 2'O-Methyl ribonucleotide
  modified_base 107..109: mod_base = OTHER; note = Phosphorothioate linkage
cctccctgctcttctacatctggttgagaatcgaaagattcttaataaggcatccttccgatgctgacttctcaccgtccgttttccaataggagcgggcggtatgtttt

SEQ ID NO: 1604 - RNA, 110 nt, synthetic construct
  source 1..110: mol_type = other RNA
  modified_base 1..3: mod_base = OTHER; note = 2'O-Methyl ribonucleotide
  modified_base 1..3: mod_base = OTHER; note = Phosphorothioate linkage
  modified_base 108..110: mod_base = OTHER; note = 2'O-Methyl ribonucleotide
  modified_base 107..109: mod_base = OTHER; note = Phosphorothioate linkage
atcgctgagtgtgcccggatgcgttgagaatcgaaagattcttaataaggcatccttccgatgctgacttctcaccgtccgttttccaataggagcgggcggtatgtttt

SEQ ID NO: 1605 - RNA, 110 nt, synthetic construct
  source 1..110: mol_type = other RNA
  modified_base 1..3: mod_base = OTHER; note = 2'O-Methyl ribonucleotide
  modified_base 1..3: mod_base = OTHER; note = Phosphorothioate linkage
  modified_base 108..110: mod_base = OTHER; note = 2'O-Methyl ribonucleotide
  modified_base 107..109: mod_base = OTHER; note = Phosphorothioate linkage
atgcagaacacggaggcagccggttgagaatcgaaagattcttaataaggcatccttccgatgctgacttctcaccgtccgttttccaataggagcgggcggtatgtttt

SEQ ID NO: 1606 - RNA, 110 nt, synthetic construct
  source 1..110: mol_type = other RNA
  modified_base 1..3: mod_base = OTHER; note = 2'O-Methyl ribonucleotide
  modified_base 1..3: mod_base = OTHER; note = Phosphorothioate linkage
  modified_base 108..110: mod_base = OTHER; note = 2'O-Methyl ribonucleotide
  modified_base 107..109: mod_base = OTHER; note = Phosphorothioate linkage
ccgatgctatccttgtgctcatgttgagaatcgaaagattcttaataaggcatccttccgatgctgacttctcaccgtccgttttccaataggagcgggcggtatgtttt

SEQ ID NO: 1607 - RNA, 110 nt, synthetic construct
  source 1..110: mol_type = other RNA
  modified_base 1..3: mod_base = OTHER; note = 2'O-Methyl ribonucleotide
  modified_base 1..3: mod_base = OTHER; note = Phosphorothioate linkage
  modified_base 108..110: mod_base = OTHER; note = 2'O-Methyl ribonucleotide
  modified_base 107..109: mod_base = OTHER; note = Phosphorothioate linkage
aggtctggctgtgttgtatgccgttgagaatcgaaagattcttaataaggcatccttccgatgctgacttctcaccgtccgttttccaataggagcgggcggtatgtttt

SEQ ID NO: 1608 - RNA, 110 nt, synthetic construct
  source 1..110: mol_type = other RNA
  modified_base 1..3: mod_base = OTHER; note = 2'O-Methyl ribonucleotide
  modified_base 1..3: mod_base = OTHER; note = Phosphorothioate linkage
  modified_base 108..110: mod_base = OTHER; note = 2'O-Methyl ribonucleotide
  modified_base 107..109: mod_base = OTHER; note = Phosphorothioate linkage
ctcatctcgagaatcgggaagggttgagaatcgaaagattcttaataaggcatccttccgatgctgacttctcaccgtccgttttccaataggagcgggcggtatgtttt

SEQ ID NO: 1609 - RNA, 110 nt, synthetic construct
  source 1..110: mol_type = other RNA
  modified_base 1..3: mod_base = OTHER; note = 2'O-Methyl ribonucleotide
  modified_base 1..3: mod_base = OTHER; note = Phosphorothioate linkage
  modified_base 108..110: mod_base = OTHER; note = 2'O-Methyl ribonucleotide
  modified_base 107..109: mod_base = OTHER; note = Phosphorothioate linkage
aaggaagacacacccctggaccgttgagaatcgaaagattcttaataaggcatccttccgatgctgacttctcaccgtccgttttccaataggagcgggcggtatgtttt

SEQ ID NO: 1610 - RNA, 110 nt, synthetic construct
  source 1..110: mol_type = other RNA
  modified_base 1..3: mod_base = OTHER; note = 2'O-Methyl ribonucleotide
  modified_base 1..3: mod_base = OTHER; note = Phosphorothioate linkage
  modified_base 108..110: mod_base = OTHER; note = 2'O-Methyl ribonucleotide
  modified_base 107..109: mod_base = OTHER; note = Phosphorothioate linkage
ccctcggtgcacaggctgctgggttgagaatcgaaagattcttaataaggcatccttccgatgctgacttctcaccgtccgttttccaataggagcgggcggtatgtttt

SEQ ID NO: 1611 - RNA, 110 nt, synthetic construct
  source 1..110: mol_type = other RNA
  modified_base 1..3: mod_base = OTHER; note = 2'O-Methyl ribonucleotide
  modified_base 1..3: mod_base = OTHER; note = Phosphorothioate linkage
  modified_base 108..110: mod_base = OTHER; note = 2'O-Methyl ribonucleotide
  modified_base 107..109: mod_base = OTHER; note = Phosphorothioate linkage
cgtgtgcactcagtttggcctcgttgagaatcgaaagattcttaataaggcatccttccgatgctgacttctcaccgtccgttttccaataggagcgggcggtatgtttt

SEQ ID NO: 1612 - RNA, 110 nt, synthetic construct
  source 1..110: mol_type = other RNA
  modified_base 1..3: mod_base = OTHER; note = 2'O-Methyl ribonucleotide
  modified_base 1..3: mod_base = OTHER; note = Phosphorothioate linkage
  modified_base 108..110: mod_base = OTHER; note = 2'O-Methyl ribonucleotide
  modified_base 107..109: mod_base = OTHER; note = Phosphorothioate linkage
ctcagtttggcctctggacaccgttgagaatcgaaagattcttaataaggcatccttccgatgctgacttctcaccgtccgttttccaataggagcgggcggtatgtttt

SEQ ID NO: 1613 - RNA, 110 nt, synthetic construct
  source 1..110: mol_type = other RNA
  modified_base 1..3: mod_base = OTHER; note = 2'O-Methyl ribonucleotide
  modified_base 1..3: mod_base = OTHER; note = Phosphorothioate linkage
  modified_base 108..110: mod_base = OTHER; note = 2'O-Methyl ribonucleotide
  modified_base 107..109: mod_base = OTHER; note = Phosphorothioate linkage
ggacaccttactacttgagcctgttgagaatcgaaagattcttaataaggcatccttccgatgctgacttctcaccgtccgttttccaataggagcgggcggtatgtttt

SEQ ID NO: 1614 - RNA, 110 nt, synthetic construct
  source 1..110: mol_type = other RNA
  modified_base 1..3: mod_base = OTHER; note = 2'O-Methyl ribonucleotide
  modified_base 1..3: mod_base = OTHER; note = Phosphorothioate linkage
  modified_base 108..110: mod_base = OTHER; note = 2'O-Methyl ribonucleotide
  modified_base 107..109: mod_base = OTHER; note = Phosphorothioate linkage
gagcctggggcacacagtgctggttgagaatcgaaagattcttaataaggcatccttccgatgctgacttctcaccgtccgttttccaataggagcgggcggtatgtttt

SEQ ID NO: 1615 - RNA, 110 nt, synthetic construct
  source 1..110: mol_type = other RNA
  modified_base 1..3: mod_base = OTHER; note = 2'O-Methyl ribonucleotide
  modified_base 1..3: mod_base = OTHER; note = Phosphorothioate linkage
  modified_base 108..110: mod_base = OTHER; note = 2'O-Methyl ribonucleotide
  modified_base 107..109: mod_base = OTHER; note = Phosphorothioate linkage
cgtcacgggggaggaccgtggagttgagaatcgaaagattcttaataaggcatccttccgatgctgacttctcaccgtccgttttccaataggagcgggcggtatgtttt

SEQ ID NO: 1616 - RNA, 110 nt, synthetic construct
  source 1..110: mol_type = other RNA
  modified_base 1..3: mod_base = OTHER; note = 2'O-Methyl ribonucleotide
  modified_base 1..3: mod_base = OTHER; note = Phosphorothioate linkage
  modified_base 108..110: mod_base = OTHER; note = 2'O-Methyl ribonucleotide
  modified_base 107..109: mod_base = OTHER; note = Phosphorothioate linkage
cacgggggaggaccgtggaggggttgagaatcgaaagattcttaataaggcatccttccgatgctgacttctcaccgtccgttttccaataggagcgggcggtatgtttt

SEQ ID NO: 1617 - RNA, 110 nt, synthetic construct
  source 1..110: mol_type = other RNA
  modified_base 1..3: mod_base = OTHER; note = 2'O-Methyl ribonucleotide
  modified_base 1..3: mod_base = OTHER; note = Phosphorothioate linkage
  modified_base 108..110: mod_base = OTHER; note = 2'O-Methyl ribonucleotide
  modified_base 107..109: mod_base = OTHER; note = Phosphorothioate linkage
aggaccgtggaggggcattatcgttgagaatcgaaagattcttaataaggcatccttccgatgctgacttctcaccgtccgttttccaataggagcgggcggtatgtttt

SEQ ID NO: 1618 - RNA, 110 nt, synthetic construct
  source 1..110: mol_type = other RNA
  modified_base 1..3: mod_base = OTHER; note = 2'O-Methyl ribonucleotide
  modified_base 1..3: mod_base = OTHER; note = Phosphorothioate linkage
  modified_base 108..110: mod_base = OTHER; note = 2'O-Methyl ribonucleotide
  modified_base 107..109: mod_base = OTHER; note = Phosphorothioate linkage
cctggccttctcaagcagttctgttgagaatcgaaagattcttaataaggcatccttccgatgctgacttctcaccgtccgttttccaataggagcgggcggtatgtttt

SEQ ID NO: 1619 - RNA, 110 nt, synthetic construct
  source 1..110: mol_type = other RNA
  modified_base 1..3: mod_base = OTHER; note = 2'O-Methyl ribonucleotide
  modified_base 1..3: mod_base = OTHER; note = Phosphorothioate linkage
  modified_base 108..110: mod_base = OTHER; note = 2'O-Methyl ribonucleotide
  modified_base 107..109: mod_base = OTHER; note = Phosphorothioate linkage
ggccttctcaagcagttctgtggttgagaatcgaaagattcttaataaggcatccttccgatgctgacttctcaccgtccgttttccaataggagcgggcggtatgtttt

SEQ ID NO: 1620 - RNA, 110 nt, synthetic construct
  source 1..110: mol_type = other RNA
  modified_base 1..3: mod_base = OTHER; note = 2'O-Methyl ribonucleotide
  modified_base 1..3: mod_base = OTHER; note = Phosphorothioate linkage
  modified_base 108..110: mod_base = OTHER; note = 2'O-Methyl ribonucleotide
  modified_base 107..109: mod_base = OTHER; note = Phosphorothioate linkage
gttctgtgacaccactgctctagttgagaatcgaaagattcttaataaggcatccttccgatgctgacttctcaccgtccgttttccaataggagcgggcggtatgtttt

SEQ ID NO: 1621 - RNA, 110 nt, synthetic construct
  source 1..110: mol_type = other RNA
  modified_base 1..3: mod_base = OTHER; note = 2'O-Methyl ribonucleotide
  modified_base 1..3: mod_base = OTHER; note = Phosphorothioate linkage
  modified_base 108..110: mod_base = OTHER; note = 2'O-Methyl ribonucleotide
  modified_base 107..109: mod_base = OTHER; note = Phosphorothioate linkage
tgaagaagatgcactgcgggcggttgagaatcgaaagattcttaataaggcatccttccgatgctgacttctcaccgtccgttttccaataggagcgggcggtatgtttt

SEQ ID NO: 1622 - RNA, 110 nt, synthetic construct
  source 1..110: mol_type = other RNA
  modified_base 1..3: mod_base = OTHER; note = 2'O-Methyl ribonucleotide
  modified_base 1..3: mod_base = OTHER; note = Phosphorothioate linkage
  modified_base 108..110: mod_base = OTHER; note = 2'O-Methyl ribonucleotide
  modified_base 107..109: mod_base = OTHER; note = Phosphorothioate linkage
ccactgctcccccgacccctcggttgagaatcgaaagattcttaataaggcatccttccgatgctgacttctcaccgtccgttttccaataggagcgggcggtatgtttt

SEQ ID NO: 1623 - RNA, 110 nt, synthetic construct
  source 1..110: mol_type = other RNA
  modified_base 1..3: mod_base = OTHER; note = 2'O-Methyl ribonucleotide
  modified_base 1..3: mod_base = OTHER; note = Phosphorothioate linkage
  modified_base 108..110: mod_base = OTHER; note = 2'O-Methyl ribonucleotide
  modified_base 107..109: mod_base = OTHER; note = Phosphorothioate linkage
cccctcggggatacagcaggtggttgagaatcgaaagattcttaataaggcatccttccgatgctgacttctcaccgtccgttttccaataggagcgggcggtatgtttt

SEQ ID NO: 1624 - RNA, 110 nt, synthetic construct
  source 1..110: mol_type = other RNA
  modified_base 1..3: mod_base = OTHER; note = 2'O-Methyl ribonucleotide
  modified_base 1..3: mod_base = OTHER; note = Phosphorothioate linkage
  modified_base 108..110: mod_base = OTHER; note = 2'O-Methyl ribonucleotide
  modified_base 107..109: mod_base = OTHER; note = Phosphorothioate linkage
ccagggagggttagctacgcctgttgagaatcgaaagattcttaataaggcatccttccgatgctgacttctcaccgtccgttttccaataggagcgggcggtatgtttt

SEQ ID NO: 1625 - RNA, 110 nt, synthetic construct
  source 1..110: mol_type = other RNA
  modified_base 1..3: mod_base = OTHER; note = 2'O-Methyl ribonucleotide
  modified_base 1..3: mod_base = OTHER; note = Phosphorothioate linkage
  modified_base 108..110: mod_base = OTHER; note = 2'O-Methyl ribonucleotide
  modified_base 107..109: mod_base = OTHER; note = Phosphorothioate linkage
gggagggttagctacgcctgtggttgagaatcgaaagattcttaataaggcatccttccgatgctgacttctcaccgtccgttttccaataggagcgggcggtatgtttt

SEQ ID NO: 1626 - RNA, 110 nt, synthetic construct
  source 1..110: mol_type = other RNA
  modified_base 1..3: mod_base = OTHER; note = 2'O-Methyl ribonucleotide
  modified_base 1..3: mod_base = OTHER; note = Phosphorothioate linkage
  modified_base 108..110: mod_base = OTHER; note = 2'O-Methyl ribonucleotide
  modified_base 107..109: mod_base = OTHER; note = Phosphorothioate linkage
ttgatgtaacggtagagcagtggttgagaatcgaaagattcttaataaggcatccttccgatgctgacttctcaccgtccgttttccaataggagcgggcggtatgtttt

SEQ ID NO: 1627 - RNA, 110 nt, synthetic construct
  source 1..110: mol_type = other RNA
  modified_base 1..3: mod_base = OTHER; note = 2'O-Methyl ribonucleotide
  modified_base 1..3: mod_base = OTHER; note = Phosphorothioate linkage
  modified_base 108..110: mod_base = OTHER; note = 2'O-Methyl ribonucleotide
  modified_base 107..109: mod_base = OTHER; note = Phosphorothioate linkage
tccacggtcctcccccgtgacggttgagaatcgaaagattcttaataaggcatccttccgatgctgacttctcaccgtccgttttccaataggagcgggcggtatgtttt

SEQ ID NO: 1628 - RNA, 110 nt, synthetic construct
  source 1..110: mol_type = other RNA
  modified_base 1..3: mod_base = OTHER; note = 2'O-Methyl ribonucleotide
  modified_base 1..3: mod_base = OTHER; note = Phosphorothioate linkage
  modified_base 108..110: mod_base = OTHER; note = 2'O-Methyl ribonucleotide
  modified_base 107..109: mod_base = OTHER; note = Phosphorothioate linkage
aggccaaactgagtgcacacgggttgagaatcgaaagattcttaataaggcatccttccgatgctgacttctcaccgtccgttttccaataggagcgggcggtatgtttt

SEQ ID NO: 1629 - RNA, 110 nt, synthetic construct
  source 1..110: mol_type = other RNA
  modified_base 1..3: mod_base = OTHER; note = 2'O-Methyl ribonucleotide
  modified_base 1..3: mod_base = OTHER; note = Phosphorothioate linkage
  modified_base 108..110: mod_base = OTHER; note = 2'O-Methyl ribonucleotide
  modified_base 107..109: mod_base = OTHER; note = Phosphorothioate linkage
cccgattctcgagatgagtgccgttgagaatcgaaagattcttaataaggcatccttccgatgctgacttctcaccgtccgttttccaataggagcgggcggtatgtttt

SEQ ID NO: 1630 - RNA, 110 nt, synthetic construct
  source 1..110: mol_type = other RNA
  modified_base 1..3: mod_base = OTHER; note = 2'O-Methyl ribonucleotide
  modified_base 1..3: mod_base = OTHER; note = Phosphorothioate linkage
  modified_base 108..110: mod_base = OTHER; note = 2'O-Methyl ribonucleotide
  modified_base 107..109: mod_base = OTHER; note = Phosphorothioate linkage
ctcgagatgagtgccagggcatgttgagaatcgaaagattcttaataaggcatccttccgatgctgacttctcaccgtccgttttccaataggagcgggcggtatgtttt

SEQ ID NO: 1631 - RNA, 110 nt, synthetic construct
  source 1..110: mol_type = other RNA
  modified_base 1..3: mod_base = OTHER; note = 2'O-Methyl ribonucleotide
  modified_base 1..3: mod_base = OTHER; note = Phosphorothioate linkage
  modified_base 108..110: mod_base = OTHER; note = 2'O-Methyl ribonucleotide
  modified_base 107..109: mod_base = OTHER; note = Phosphorothioate linkage
agggcatacaacacagccagacgttgagaatcgaaagattcttaataaggcatccttccgatgctgacttctcaccgtccgttttccaataggagcgggcggtatgtttt

SEQ ID NO: 1632 - RNA, 110 nt, synthetic construct
  source 1..110: mol_type = other RNA
  modified_base 1..3: mod_base = OTHER; note = 2'O-Methyl ribonucleotide
  modified_base 1..3: mod_base = OTHER; note = Phosphorothioate linkage
  modified_base 108..110: mod_base = OTHER; note = 2'O-Methyl ribonucleotide
  modified_base 107..109: mod_base = OTHER; note = Phosphorothioate linkage
gcatacaacacagccagacctggttgagaatcgaaagattcttaataaggcatccttccgatgctgacttctcaccgtccgttttccaataggagcgggcggtatgtttt

SEQ ID NO: 1633 - RNA, 110 nt, synthetic construct
  source 1..110: mol_type = other RNA
  modified_base 1..3: mod_base = OTHER; note = 2'O-Methyl ribonucleotide
  modified_base 1..3: mod_base = OTHER; note = Phosphorothioate linkage
  modified_base 108..110: mod_base = OTHER; note = 2'O-Methyl ribonucleotide
  modified_base 107..109: mod_base = OTHER; note = Phosphorothioate linkage
agacctggcaccacgtagccgagttgagaatcgaaagattcttaataaggcatccttccgatgctgacttctcaccgtccgttttccaataggagcgggcggtatgtttt

SEQ ID NO: 1634 - RNA, 110 nt, synthetic construct
  source 1..110: mol_type = other RNA
  modified_base 1..3: mod_base = OTHER; note = 2'O-Methyl ribonucleotide
  modified_base 1..3: mod_base = OTHER; note = Phosphorothioate linkage
  modified_base 108..110: mod_base = OTHER; note = 2'O-Methyl ribonucleotide
  modified_base 107..109: mod_base = OTHER; note = Phosphorothioate linkage
cacgtagccgatgagcacaagggttgagaatcgaaagattcttaataaggcatccttccgatgctgacttctcaccgtccgttttccaataggagcgggcggtatgtttt

SEQ ID NO: 1635 - RNA, 110 nt, synthetic construct
  source 1..110: mol_type = other RNA
  modified_base 1..3: mod_base = OTHER; note = 2'O-Methyl ribonucleotide
  modified_base 1..3: mod_base = OTHER; note = Phosphorothioate linkage
  modified_base 108..110: mod_base = OTHER; note = 2'O-Methyl ribonucleotide
  modified_base 107..109: mod_base = OTHER; note = Phosphorothioate linkage
ggctgcctccgtgttctgcatcgttgagaatcgaaagattcttaataaggcatccttccgatgctgacttctcaccgtccgttttccaataggagcgggcggtatgtttt

SEQ ID NO: 1636 - RNA, 110 nt, synthetic construct
  source 1..110: mol_type = other RNA
  modified_base 1..3: mod_base = OTHER; note = 2'O-Methyl ribonucleotide
  modified_base 1..3: mod_base = OTHER; note = Phosphorothioate linkage
  modified_base 108..110: mod_base = OTHER; note = 2'O-Methyl ribonucleotide
  modified_base 107..109: mod_base = OTHER; note = Phosphorothioate linkage
cgggcacactcagcgattctaggttgagaatcgaaagattcttaataaggcatccttccgatgctgacttctcaccgtccgttttccaataggagcgggcggtatgtttt

SEQ ID NO: 1637 - RNA, 110 nt, synthetic construct
  source 1..110: mol_type = other RNA
  modified_base 1..3: mod_base = OTHER; note = 2'O-Methyl ribonucleotide
  modified_base 1..3: mod_base = OTHER; note = Phosphorothioate linkage
  modified_base 108..110: mod_base = OTHER; note = 2'O-Methyl ribonucleotide
  modified_base 107..109: mod_base = OTHER; note = Phosphorothioate linkage
aagagcagggaggagaagctgggttgagaatcgaaagattcttaataaggcatccttccgatgctgacttctcaccgtccgttttccaataggagcgggcggtatgtttt

SEQ ID NO: 1638 - RNA, 110 nt, synthetic construct
  source 1..110: mol_type = other RNA
  modified_base 1..3: mod_base = OTHER; note = 2'O-Methyl ribonucleotide
  modified_base 1..3: mod_base = OTHER; note = Phosphorothioate linkage
  modified_base 108..110: mod_base = OTHER; note = 2'O-Methyl ribonucleotide
  modified_base 107..109: mod_base = OTHER; note = Phosphorothioate linkage
gagcaccgcccctccccagacggttgagaatcgaaagattcttaataaggcatccttccgatgctgacttctcaccgtccgttttccaataggagcgggcggtatgtttt

SEQ ID NO: 1639 - RNA, 110 nt, synthetic construct
  source 1..110: mol_type = other RNA
  modified_base 1..3: mod_base = OTHER; note = 2'O-Methyl ribonucleotide
  modified_base 1..3: mod_base = OTHER; note = Phosphorothioate linkage
  modified_base 108..110: mod_base = OTHER; note = 2'O-Methyl ribonucleotide
  modified_base 107..109: mod_base = OTHER; note = Phosphorothioate linkage
acgtgccgggtgttgtacacacgttgagaatcgaaagattcttaataaggcatccttccgatgctgacttctcaccgtccgttttccaataggagcgggcggtatgtttt

SEQ ID NO: 1640 - RNA, 110 nt, synthetic construct
  source 1..110: mol_type = other RNA
  modified_base 1..3: mod_base = OTHER; note = 2'O-Methyl ribonucleotide
  modified_base 1..3: mod_base = OTHER; note = Phosphorothioate linkage
  modified_base 108..110: mod_base = OTHER; note = 2'O-Methyl ribonucleotide
  modified_base 107..109: mod_base = OTHER; note = Phosphorothioate linkage
actggccatgtaggtgcgtggcgttgagaatcgaaagattcttaataaggcatccttccgatgctgacttctcaccgtccgttttccaataggagcgggcggtatgtttt

SEQ ID NO: 1641 - RNA, 110 nt, synthetic construct
  source 1..110: mol_type = other RNA
  modified_base 1..3: mod_base = OTHER; note = 2'O-Methyl ribonucleotide
  modified_base 1..3: mod_base = OTHER; note = Phosphorothioate linkage
  modified_base 108..110: mod_base = OTHER; note = 2'O-Methyl ribonucleotide
  modified_base 107..109: mod_base = OTHER; note = Phosphorothioate linkage
agtcaaggctcagcagtgcagtgttgagaatcgaaagattcttaataaggcatccttccgatgctgacttctcaccgtccgttttccaataggagcgggcggtatgtttt

SEQ ID NO: 1642 - RNA, 110 nt, synthetic construct
  source 1..110: mol_type = other RNA
  modified_base 1..3: mod_base = OTHER; note = 2'O-Methyl ribonucleotide
  modified_base 1..3: mod_base = OTHER; note = Phosphorothioate linkage
  modified_base 108..110: mod_base = OTHER; note = 2'O-Methyl ribonucleotide
  modified_base 107..109: mod_base = OTHER; note = Phosphorothioate linkage
ctcagcagtgcagtggagtacagttgagaatcgaaagattcttaataaggcatccttccgatgctgacttctcaccgtccgttttccaataggagcgggcggtatgtttt

SEQ ID NO: 1643 - RNA, 110 nt, synthetic construct
  source 1..110: mol_type = other RNA
  modified_base 1..3: mod_base = OTHER; note = 2'O-Methyl ribonucleotide
  modified_base 1..3: mod_base = OTHER; note = Phosphorothioate linkage
  modified_base 108..110: mod_base = OTHER; note = 2'O-Methyl ribonucleotide
  modified_base 107..109: mod_base = OTHER; note = Phosphorothioate linkage
gtggagtacatggtcaccaggggttgagaatcgaaagattcttaataaggcatccttccgatgctgacttctcaccgtccgttttccaataggagcgggcggtatgtttt

SEQ ID NO: 1644 - RNA, 110 nt, synthetic construct
  source 1..110: mol_type = other RNA
  modified_base 1..3: mod_base = OTHER; note = 2'O-Methyl ribonucleotide
  modified_base 1..3: mod_base = OTHER; note = Phosphorothioate linkage
  modified_base 108..110: mod_base = OTHER; note = 2'O-Methyl ribonucleotide
  modified_base 107..109: mod_base = OTHER; note = Phosphorothioate linkage
gccacgttgaacaggatgagcagttgagaatcgaaagattcttaataaggcatccttccgatgctgacttctcaccgtccgttttccaataggagcgggcggtatgtttt

SEQ ID NO: 1645 - RNA, 110 nt, synthetic construct
  source 1..110: mol_type = other RNA
  modified_base 1..3: mod_base = OTHER; note = 2'O-Methyl ribonucleotide
  modified_base 1..3: mod_base = OTHER; note = Phosphorothioate linkage
  modified_base 108..110: mod_base = OTHER; note = 2'O-Methyl ribonucleotide
  modified_base 107..109: mod_base = OTHER; note = Phosphorothioate linkage
acctggagtgggcagggcccaagttgagaatcgaaagattcttaataaggcatccttccgatgctgacttctcaccgtccgttttccaataggagcgggcggtatgtttt

SEQ ID NO: 1646 - RNA, 110 nt, synthetic construct
  source 1..110: mol_type = other RNA
  modified_base 1..3: mod_base = OTHER; note = 2'O-Methyl ribonucleotide
  modified_base 1..3: mod_base = OTHER; note = Phosphorothioate linkage
  modified_base 108..110: mod_base = OTHER; note = 2'O-Methyl ribonucleotide
  modified_base 107..109: mod_base = OTHER; note = Phosphorothioate linkage
aggtacgcaggtgccagtgccggttgagaatcgaaagattcttaataaggcatccttccgatgctgacttctcaccgtccgttttccaataggagcgggcggtatgtttt

SEQ ID NO: 1647 - RNA, 110 nt, synthetic construct
  source 1..110: mol_type = other RNA
  modified_base 1..3: mod_base = OTHER; note = 2'O-Methyl ribonucleotide
  modified_base 1..3: mod_base = OTHER; note = Phosphorothioate linkage
  modified_base 108..110: mod_base = OTHER; note = 2'O-Methyl ribonucleotide
  modified_base 107..109: mod_base = OTHER; note = Phosphorothioate linkage
gccagtgccgtgagcaccagccgttgagaatcgaaagattcttaataaggcatccttccgatgctgacttctcaccgtccgttttccaataggagcgggcggtatgtttt

SEQ ID NO: 1648 - RNA, 110 nt, synthetic construct
  source 1..110: mol_type = other RNA
  modified_base 1..3: mod_base = OTHER; note = 2'O-Methyl ribonucleotide
  modified_base 1..3: mod_base = OTHER; note = Phosphorothioate linkage
  modified_base 108..110: mod_base = OTHER; note = 2'O-Methyl ribonucleotide
  modified_base 107..109: mod_base = OTHER; note = Phosphorothioate linkage
gccgtgagcaccagccccgccagttgagaatcgaaagattcttaataaggcatccttccgatgctgacttctcaccgtccgttttccaataggagcgggcggtatgtttt

SEQ ID NO: 1649 - RNA, 110 nt, synthetic construct
  source 1..110: mol_type = other RNA
  modified_base 1..3: mod_base = OTHER; note = 2'O-Methyl ribonucleotide
  modified_base 1..3: mod_base = OTHER; note = Phosphorothioate linkage
  modified_base 108..110: mod_base = OTHER; note = 2'O-Methyl ribonucleotide
  modified_base 107..109: mod_base = OTHER; note = Phosphorothioate linkage
gccccgccacggccatgttcacgttgagaatcgaaagattcttaataaggcatccttccgatgctgacttctcaccgtccgttttccaataggagcgggcggtatgtttt

SEQ ID NO: 1650 - RNA, 110 nt, synthetic construct
  source 1..110: mol_type = other RNA
  modified_base 1..3: mod_base = OTHER; note = 2'O-Methyl ribonucleotide
  modified_base 1..3: mod_base = OTHER; note = Phosphorothioate linkage
  modified_base 108..110: mod_base = OTHER; note = 2'O-Methyl ribonucleotide
  modified_base 107..109: mod_base = OTHER; note = Phosphorothioate linkage
gccatgttcacgaagtacacgtgttgagaatcgaaagattcttaataaggcatccttccgatgctgacttctcaccgtccgttttccaataggagcgggcggtatgtttt

SEQ ID NO: 1651 - RNA, 110 nt, synthetic construct
  source 1..110: mol_type = other RNA
  modified_base 1..3: mod_base = OTHER; note = 2'O-Methyl ribonucleotide
  modified_base 1..3: mod_base = OTHER; note = Phosphorothioate linkage
  modified_base 108..110: mod_base = OTHER; note = 2'O-Methyl ribonucleotide
  modified_base 107..109: mod_base = OTHER; note = Phosphorothioate linkage
ttcacgaagtacacgtcgggcagttgagaatcgaaagattcttaataaggcatccttccgatgctgacttctcaccgtccgttttccaataggagcgggcggtatgtttt

SEQ ID NO: 1652 - RNA, 110 nt, synthetic construct
  source 1..110: mol_type = other RNA
  modified_base 1..3: mod_base = OTHER; note = 2'O-Methyl ribonucleotide
  modified_base 1..3: mod_base = OTHER; note = Phosphorothioate linkage
  modified_base 108..110: mod_base = OTHER; note = 2'O-Methyl ribonucleotide
  modified_base 107..109: mod_base = OTHER; note = Phosphorothioate linkage
gtgttcttgctggccaggttgggttgagaatcgaaagattcttaataaggcatccttccgatgctgacttctcaccgtccgttttccaataggagcgggcggtatgtttt

SEQ ID NO: 1653 - RNA, 110 nt, synthetic construct
  source 1..110: mol_type = other RNA
  modified_base 1..3: mod_base = OTHER; note = 2'O-Methyl ribonucleotide
  modified_base 1..3: mod_base = OTHER; note = Phosphorothioate linkage
  modified_base 108..110: mod_base = OTHER; note = 2'O-Methyl ribonucleotide
  modified_base 107..109: mod_base = OTHER; note = Phosphorothioate linkage
ggccaggttggccagcaccagagttgagaatcgaaagattcttaataaggcatccttccgatgctgacttctcaccgtccgttttccaataggagcgggcggtatgtttt

SEQ ID NO: 1654 - RNA, 110 nt, synthetic construct
  source 1..110: mol_type = other RNA
  modified_base 1..3: mod_base = OTHER; note = 2'O-Methyl ribonucleotide
  modified_base 1..3: mod_base = OTHER; note = Phosphorothioate linkage
  modified_base 108..110: mod_base = OTHER; note = 2'O-Methyl ribonucleotide
  modified_base 107..109: mod_base = OTHER; note = Phosphorothioate linkage
caggttggccagcaccagaagagttgagaatcgaaagattcttaataaggcatccttccgatgctgacttctcaccgtccgttttccaataggagcgggcggtatgtttt

SEQ ID NO: 1655 - RNA, 110 nt, synthetic construct
  source 1..110: mol_type = other RNA
  modified_base 1..3: mod_base = OTHER; note = 2'O-Methyl ribonucleotide
  modified_base 1..3: mod_base = OTHER; note = Phosphorothioate linkage
  modified_base 108..110: mod_base = OTHER; note = 2'O-Methyl ribonucleotide
  modified_base 107..109: mod_base = OTHER; note = Phosphorothioate linkage
cccacagccccaggcgcaggttgttgagaatcgaaagattcttaataaggcatccttccgatgctgacttctcaccgtccgttttccaataggagcgggcggtatgtttt

SEQ ID NO: 1656 - RNA, 110 nt, synthetic construct
  source 1..110: mol_type = other RNA
  modified_base 1..3: mod_base = OTHER; note = 2'O-Methyl ribonucleotide
  modified_base 1..3: mod_base = OTHER; note = Phosphorothioate linkage
  modified_base 108..110: mod_base = OTHER; note = 2'O-Methyl ribonucleotide
  modified_base 107..109: mod_base = OTHER; note = Phosphorothioate linkage
agcccacgctgtgctgttgagtgttgagaatcgaaagattcttaataaggcatccttccgatgctgacttctcaccgtccgttttccaataggagcgggcggtatgtttt

SEQ ID NO: 1657 - DNA, 22 bp, Mus musculus
  source 1..22: mol_type = genomic DNA
atgtggagctgtggcccactca

SEQ ID NO: 1658 - DNA, 22 bp, Mus musculus
  source 1..22: mol_type = genomic DNA
gggcaggggtccctgtgagctt

SEQ ID NO: 1659 - DNA, 22 bp, Mus musculus
  source 1..22: mol_type = genomic DNA
gtgctggccaacctggccagca

SEQ ID NO: 1660 - DNA, 22 bp, Mus musculus
  source 1..22: mol_type = genomic DNA
ctggccaacctggccagcaaga

SEQ ID NO: 1661 - DNA, 22 bp, Mus musculus
  source 1..22: mol_type = genomic DNA
aacctggccagcaagaacacca

SEQ ID NO: 1662 - DNA, 22 bp, Mus musculus
  source 1..22: mol_type = genomic DNA
accatgcccgacgtgtacttcg

SEQ ID NO: 1663 - DNA, 22 bp, Mus musculus
  source 1..22: mol_type = genomic DNA
ggccgtggcggggctggtgctc

SEQ ID NO: 1664 - DNA, 22 bp, Mus musculus
  source 1..22: mol_type = genomic DNA
ggcggggctggtgctcacggca

SEQ ID NO: 1665 - DNA, 22 bp, Mus musculus
  source 1..22: mol_type = genomic DNA
gagcctcagcagtgaggcccat

SEQ ID NO: 1666 - DNA, 22 bp, Mus musculus
  source 1..22: mol_type = genomic DNA
ctgttcaacgtggcttccctgg

SEQ ID NO: 1667 - DNA, 22 bp, Mus musculus
  source 1..22: mol_type = genomic DNA
actccactgcactgctgagcct

SEQ ID NO: 1668 - DNA, 22 bp, Mus musculus
  source 1..22: mol_type = genomic DNA
ccactgcactgctgagccttga

SEQ ID NO: 1669 - DNA, 22 bp, Mus musculus
  source 1..22: mol_type = genomic DNA
tgactactacatcgagcgtgcc

SEQ ID NO: 1670 - DNA, 22 bp, Mus musculus
  source 1..22: mol_type = genomic DNA
cgcacctacatggccagtgtgt

SEQ ID NO: 1671 - DNA, 22 bp, Mus musculus
  source 1..22: mol_type = genomic DNA
acatggccagtgtgtacaacac

SEQ ID NO: 1672 - DNA, 22 bp, Mus musculus
  source 1..22: mol_type = genomic DNA
cctccctgctcttctacatctg

SEQ ID NO: 1673 - DNA, 22 bp, Mus musculus
  source 1..22: mol_type = genomic DNA
atcgctgagtgtgcccggatgc

SEQ ID NO: 1674 - DNA, 22 bp, Mus musculus
  source 1..22: mol_type = genomic DNA
atgcagaacacggaggcagccg

SEQ ID NO: 1675 - DNA, 22 bp, Mus musculus
  source 1..22: mol_type = genomic DNA
ccgatgctatccttgtgctcat

SEQ ID NO: 1676 - DNA, 22 bp, Mus musculus
  source 1..22: mol_type = genomic DNA
aggtctggctgtgttgtatgcc

SEQ ID NO: 1677 - DNA, 22 bp, Mus musculus
  source 1..22: mol_type = genomic DNA
ctcatctcgagaatcgggaagg

SEQ ID NO: 1678 - DNA, 22 bp, Mus musculus
  source 1..22: mol_type = genomic DNA
aaggaagacacacccctggacc

SEQ ID NO: 1679 - DNA, 22 bp, Mus musculus
  source 1..22: mol_type = genomic DNA
ccctcggtgcacaggctgctgg

SEQ ID NO: 1680 - DNA, 22 bp, Mus musculus
  source 1..22: mol_type = genomic DNA
cgtgtgcactcagtttggcctc

SEQ ID NO: 1681 - DNA, 22 bp, Mus musculus
  source 1..22: mol_type = genomic DNA
ctcagtttggcctctggacacc

SEQ ID NO: 1682 - DNA, 22 bp, Mus musculus
  source 1..22: mol_type = genomic DNA
ggacaccttactacttgagcct

SEQ ID NO: 1683 - DNA, 22 bp, Mus musculus
  source 1..22: mol_type = genomic DNA
gagcctggggcacacagtgctg

SEQ ID NO: 1684 - DNA, 22 bp, Mus musculus
  source 1..22: mol_type = genomic DNA
cgtcacgggggaggaccgtgga

SEQ ID NO: 1685 - DNA, 22 bp, Mus musculus
  source 1..22: mol_type = genomic DNA
cacgggggaggaccgtggaggg

SEQ ID NO: 1686 - DNA, 22 bp, Mus musculus
  source 1..22: mol_type = genomic DNA
aggaccgtggaggggcattatc

SEQ ID NO: 1687 - DNA, 22 bp, Mus musculus
  source 1..22: mol_type = genomic DNA
cctggccttctcaagcagttct

SEQ ID NO: 1688 - DNA, 22 bp, Mus musculus
  source 1..22: mol_type = genomic DNA
ggccttctcaagcagttctgtg

SEQ ID NO: 1689 - DNA, 22 bp, Mus musculus
  source 1..22: mol_type = genomic DNA
gttctgtgacaccactgctcta

SEQ ID NO: 1690 - DNA, 22 bp, Mus musculus
  source 1..22: mol_type = genomic DNA
tgaagaagatgcactgcgggcg

SEQ ID NO: 1691 - DNA, 22 bp, Mus musculus
  source 1..22: mol_type = genomic DNA
ccactgctcccccgacccctcg

SEQ ID NO: 1692 - DNA, 22 bp, Mus musculus
  source 1..22: mol_type = genomic DNA
cccctcggggatacagcaggtg

SEQ ID NO: 1693 - DNA, 22 bp, Mus musculus
  source 1..22: mol_type = genomic DNA
ccagggagggttagctacgcct

SEQ ID NO: 1694 - DNA, 22 bp, Mus musculus
  source 1..22: mol_type = genomic DNA
gggagggttagctacgcctgtg

SEQ ID NO: 1695 - DNA, 22 bp, Mus musculus
  source 1..22: mol_type = genomic DNA
ttgatgtaacggtagagcagtg

SEQ ID NO: 1696 - DNA, 22 bp, Mus musculus
  source 1..22: mol_type = genomic DNA
tccacggtcctcccccgtgacg

SEQ ID NO: 1697 - DNA, 22 bp, Mus musculus
  source 1..22: mol_type = genomic DNA
aggccaaactgagtgcacacgg

SEQ ID NO: 1698 - DNA, 22 bp, Mus musculus
  source 1..22: mol_type = genomic DNA
cccgattctcgagatgagtgcc

SEQ ID NO: 1699 - DNA, 22 bp, Mus musculus
  source 1..22: mol_type = genomic DNA
ctcgagatgagtgccagggcat

SEQ ID NO: 1700 - DNA, 22 bp, Mus musculus
  source 1..22: mol_type = genomic DNA
agggcatacaacacagccagac

SEQ ID NO: 1701 - DNA, 22 bp, Mus musculus
  source 1..22: mol_type = genomic DNA
gcatacaacacagccagacctg

SEQ ID NO: 1702 - DNA, 22 bp, Mus musculus
  source 1..22: mol_type = genomic DNA
agacctggcaccacgtagccga

SEQ ID NO: 1703 - DNA, 22 bp, Mus musculus
  source 1..22: mol_type = genomic DNA
cacgtagccgatgagcacaagg

SEQ ID NO: 1704 - DNA, 22 bp, Mus musculus
  source 1..22: mol_type = genomic DNA
ggctgcctccgtgttctgcatc

SEQ ID NO: 1705 - DNA, 22 bp, Mus musculus
  source 1..22: mol_type = genomic DNA
cgggcacactcagcgattctag

SEQ ID NO: 1706 - DNA, 22 bp, Mus musculus
  source 1..22: mol_type = genomic DNA
aagagcagggaggagaagctgg

SEQ ID NO: 1707 - DNA, 22 bp, Mus musculus
  source 1..22: mol_type = genomic DNA
gagcaccgcccctccccagacg

SEQ ID NO: 1708 - DNA, 22 bp, Mus musculus
  source 1..22: mol_type = genomic DNA
acgtgccgggtgttgtacacac

SEQ ID NO: 1709 - DNA, 22 bp, Mus musculus
  source 1..22: mol_type = genomic DNA
actggccatgtaggtgcgtggc

SEQ ID NO: 1710 - DNA, 22 bp, Mus musculus
  source 1..22: mol_type = genomic DNA
agtcaaggctcagcagtgcagt

SEQ ID NO: 1711 - DNA, 22 bp, Mus musculus
  source 1..22: mol_type = genomic DNA
ctcagcagtgcagtggagtaca

SEQ ID NO: 1712 - DNA, 22 bp, Mus musculus
  source 1..22: mol_type = genomic DNA
gtggagtacatggtcaccaggg

SEQ ID NO: 1713 - DNA, 22 bp, Mus musculus
  source 1..22: mol_type = genomic DNA
gccacgttgaacaggatgagca

SEQ ID NO: 1714 - DNA, 22 bp, Mus musculus
  source 1..22: mol_type = genomic DNA
acctggagtgggcagggcccaa

SEQ ID NO: 1715 - DNA, 22 bp, Mus musculus
  source 1..22: mol_type = genomic DNA
aggtacgcaggtgccagtgccg

SEQ ID NO: 1716 - DNA, 22 bp, Mus musculus
  source 1..22: mol_type = genomic DNA
gccagtgccgtgagcaccagcc

SEQ ID NO: 1717 - DNA, 22 bp, Mus musculus
  source 1..22: mol_type = genomic DNA
gccgtgagcaccagccccgcca

SEQ ID NO: 1718 - DNA, 22 bp, Mus musculus
  source 1..22: mol_type = genomic DNA
gccccgccacggccatgttcac

SEQ ID NO: 1719 - DNA, 22 bp, Mus musculus
  source 1..22: mol_type = genomic DNA
gccatgttcacgaagtacacgt

SEQ ID NO: 1720 - DNA, 22 bp, Mus musculus
  source 1..22: mol_type = genomic DNA
ttcacgaagtacacgtcgggca

SEQ ID NO: 1721 - DNA, 22 bp, Mus musculus
  source 1..22: mol_type = genomic DNA
gtgttcttgctggccaggttgg

SEQ ID NO: 1722 - DNA, 22 bp, Mus musculus
  source 1..22: mol_type = genomic DNA
ggccaggttggccagcaccaga

SEQ ID NO: 1723 - DNA, 22 bp, Mus musculus
  source 1..22: mol_type = genomic DNA
caggttggccagcaccagaaga

SEQ ID NO: 1724 - DNA, 22 bp, Mus musculus
  source 1..22: mol_type = genomic DNA
cccacagccccaggcgcaggtt

SEQ ID NO: 1725 - DNA, 22 bp, Mus musculus
  source 1..22: mol_type = genomic DNA
agcccacgctgtgctgttgagt

SEQ ID NO: 1726 - RNA, 110 nt, synthetic construct
  source 1..110: mol_type = other RNA
  modified_base 1..3: mod_base = OTHER; note = 2'O-Methyl ribonucleotide
  modified_base 1..3: mod_base = OTHER; note = Phosphorothioate linkage
  modified_base 108..110: mod_base = OTHER; note = 2'O-Methyl ribonucleotide
  modified_base 107..109: mod_base = OTHER; note = Phosphorothioate linkage
ggcagagactatgtgtcccagtgttgagaatcgaaagattcttaataaggcatccttccgatgctgacttctcaccgtccgttttccaataggagcgggcggtatgtttt

SEQ ID NO: 1727 - RNA, 110 nt, synthetic construct
  source 1..110: mol_type = other RNA
  modified_base 1..3: mod_base = OTHER; note = 2'O-Methyl ribonucleotide
  modified_base 1..3: mod_base = OTHER; note = Phosphorothioate linkage
  modified_base 108..110: mod_base = OTHER; note = 2'O-Methyl ribonucleotide
  modified_base 107..109: mod_base = OTHER; note = Phosphorothioate linkage
ccttgggccaacagctgaagtagttgagaatcgaaagattcttaataaggcatccttccgatgctgacttctcaccgtccgttttccaataggagcgggcggtatgtttt

SEQ ID NO: 1728 - RNA, 110 nt, synthetic construct
  source 1..110: mol_type = other RNA
  modified_base 1..3: mod_base = OTHER; note = 2'O-Methyl ribonucleotide
  modified_base 1..3: mod_base = OTHER; note = Phosphorothioate linkage
  modified_base 108..110: mod_base = OTHER; note = 2'O-Methyl ribonucleotide
  modified_base 107..109: mod_base = OTHER; note = Phosphorothioate linkage
gaccgcatccacatacacattagttgagaatcgaaagattcttaataaggcatccttccgatgctgacttctcaccgtccgttttccaataggagcgggcggtatgtttt

SEQ ID NO: 1729 - RNA, 110 nt, synthetic construct
  source 1..110: mol_type = other RNA
  modified_base 1..3: mod_base = OTHER; note = 2'O-Methyl ribonucleotide
  modified_base 1..3: mod_base = OTHER; note = Phosphorothioate linkage
  modified_base 108..110: mod_base = OTHER; note = 2'O-Methyl ribonucleotide
  modified_base 107..109: mod_base = OTHER; note = Phosphorothioate linkage
accgcatccacatacacattaggttgagaatcgaaagattcttaataaggcatccttccgatgctgacttctcaccgtccgttttccaataggagcgggcggtatgtttt

SEQ ID NO: 1730 - RNA, 110 nt, synthetic construct
  source 1..110: mol_type = other RNA
  modified_base 1..3: mod_base = OTHER; note = 2'O-Methyl ribonucleotide
  modified_base 1..3: mod_base = OTHER; note = Phosphorothioate linkage
  modified_base 108..110: mod_base = OTHER; note = 2'O-Methyl ribonucleotide
  modified_base 107..109: mod_base = OTHER; note = Phosphorothioate linkage
tccccctctagcctgaatctccgttgagaatcgaaagattcttaataaggcatccttccgatgctgacttctcaccgtccgttttccaataggagcgggcggtatgtttt

SEQ ID NO: 1731 - RNA, 110 nt, synthetic construct
  source 1..110: mol_type = other RNA
  modified_base 1..3: mod_base = OTHER; note = 2'O-Methyl ribonucleotide
  modified_base 1..3: mod_base = OTHER; note = Phosphorothioate linkage
  modified_base 108..110: mod_base = OTHER; note = 2'O-Methyl ribonucleotide
  modified_base 107..109: mod_base = OTHER; note = Phosphorothioate linkage
ccccctctagcctgaatctcctgttgagaatcgaaagattcttaataaggcatccttccgatgctgacttctcaccgtccgttttccaataggagcgggcggtatgtttt

SEQ ID NO: 1732 - RNA, 110 nt, synthetic construct
  source 1..110: mol_type = other RNA
  modified_base 1..3: mod_base = OTHER; note = 2'O-Methyl ribonucleotide
  modified_base 1..3: mod_base = OTHER; note = Phosphorothioate linkage
  modified_base 108..110: mod_base = OTHER; note = 2'O-Methyl ribonucleotide
  modified_base 107..109: mod_base = OTHER; note = Phosphorothioate linkage
tcgggacttctgggataacctggttgagaatcgaaagattcttaataaggcatccttccgatgctgacttctcaccgtccgttttccaataggagcgggcggtatgtttt

SEQ ID NO: 1733 - RNA, 110 nt, synthetic construct
  source 1..110: mol_type = other RNA
  modified_base 1..3: mod_base = OTHER; note = 2'O-Methyl ribonucleotide
  modified_base 1..3: mod_base = OTHER; note = Phosphorothioate linkage
  modified_base 108..110: mod_base = OTHER; note = 2'O-Methyl ribonucleotide
  modified_base 107..109: mod_base = OTHER; note = Phosphorothioate linkage
gacttctgggataacctggagagttgagaatcgaaagattcttaataaggcatccttccgatgctgacttctcaccgtccgttttccaataggagcgggcggtatgtttt

SEQ ID NO: 1734 - RNA, 110 nt, synthetic construct
  source 1..110: mol_type = other RNA
  modified_base 1..3: mod_base = OTHER; note = 2'O-Methyl ribonucleotide
  modified_base 1..3: mod_base = OTHER; note = Phosphorothioate linkage
  modified_base 108..110: mod_base = OTHER; note = 2'O-Methyl ribonucleotide
  modified_base 107..109: mod_base = OTHER; note = Phosphorothioate linkage
gatgaacaaggacctagaggaagttgagaatcgaaagattcttaataaggcatccttccgatgctgacttctcaccgtccgttttccaataggagcgggcggtatgtttt

SEQ ID NO: 1735 - RNA, 110 nt, synthetic construct
  source 1..110: mol_type = other RNA
  modified_base 1..3: mod_base = OTHER; note = 2'O-Methyl ribonucleotide
  modified_base 1..3: mod_base = OTHER; note = Phosphorothioate linkage
  modified_base 108..110: mod_base = OTHER; note = 2'O-Methyl ribonucleotide
  modified_base 107..109: mod_base = OTHER; note = Phosphorothioate linkage
cagaaggtgcagccctacctgggttgagaatcgaaagattcttaataaggcatccttccgatgctgacttctcaccgtccgttttccaataggagcgggcggtatgtttt

SEQ ID NO: 1736 - RNA, 110 nt, synthetic construct
  source 1..110: mol_type = other RNA
  modified_base 1..3: mod_base = OTHER; note = 2'O-Methyl ribonucleotide
  modified_base 1..3: mod_base = OTHER; note = Phosphorothioate linkage
  modified_base 108..110: mod_base = OTHER; note = 2'O-Methyl ribonucleotide
  modified_base 107..109: mod_base = OTHER; note = Phosphorothioate linkage
gccctacctggacgaattccaggttgagaatcgaaagattcttaataaggcatccttccgatgctgacttctcaccgtccgttttccaataggagcgggcggtatgtttt

SEQ ID NO: 1737 - RNA, 110 nt, synthetic construct
  source 1..110: mol_type = other RNA
  modified_base 1..3: mod_base = OTHER; note = 2'O-Methyl ribonucleotide
  modified_base 1..3: mod_base = OTHER; note = Phosphorothioate linkage
  modified_base 108..110: mod_base = OTHER; note = 2'O-Methyl ribonucleotide
  modified_base 107..109: mod_base = OTHER; note = Phosphorothioate linkage
ccctacctggacgaattccagagttgagaatcgaaagattcttaataaggcatccttccgatgctgacttctcaccgtccgttttccaataggagcgggcggtatgtttt

SEQ ID NO: 1738 - RNA, 110 nt, synthetic construct
  source 1..110: mol_type = other RNA
  modified_base 1..3: mod_base = OTHER; note = 2'O-Methyl ribonucleotide
  modified_base 1..3: mod_base = OTHER; note = Phosphorothioate linkage
  modified_base 108..110: mod_base = OTHER; note = 2'O-Methyl ribonucleotide
  modified_base 107..109: mod_base = OTHER; note = Phosphorothioate linkage
cctggacgaattccagaagaaagttgagaatcgaaagattcttaataaggcatccttccgatgctgacttctcaccgtccgttttccaataggagcgggcggtatgtttt

SEQ ID NO: 1739 - RNA, 110 nt, synthetic construct
  source 1..110: mol_type = other RNA
  modified_base 1..3: mod_base = OTHER; note = 2'O-Methyl ribonucleotide
  modified_base 1..3: mod_base = OTHER; note = Phosphorothioate linkage
  modified_base 108..110: mod_base = OTHER; note = 2'O-Methyl ribonucleotide
  modified_base 107..109: mod_base = OTHER; note = Phosphorothioate linkage
gggagactgtcccctgtggctggttgagaatcgaaagattcttaataaggcatccttccgatgctgacttctcaccgtccgttttccaataggagcgggcggtatgtttt

SEQ ID NO: 1740 - RNA, 110 nt, synthetic construct
  source 1..110: mol_type = other RNA
  modified_base 1..3: mod_base = OTHER; note = 2'O-Methyl ribonucleotide
  modified_base 1..3: mod_base = OTHER; note = Phosphorothioate linkage
  modified_base 108..110: mod_base = OTHER; note = 2'O-Methyl ribonucleotide
  modified_base 107..109: mod_base = OTHER; note = Phosphorothioate linkage
ttgaacgagtaccacaccaggggttgagaatcgaaagattcttaataaggcatccttccgatgctgacttctcaccgtccgttttccaataggagcgggcggtatgtttt

SEQ ID NO: 1741 - RNA, 110 nt, synthetic construct
  source 1..110: mol_type = other RNA
  modified_base 1..3: mod_base = OTHER; note = 2'O-Methyl ribonucleotide
  modified_base 1..3: mod_base = OTHER; note = Phosphorothioate linkage
  modified_base 108..110: mod_base = OTHER; note = 2'O-Methyl ribonucleotide
  modified_base 107..109: mod_base = OTHER; note = Phosphorothioate linkage
aacccacctgaagacacttggcgttgagaatcgaaagattcttaataaggcatccttccgatgctgacttctcaccgtccgttttccaataggagcgggcggtatgtttt

SEQ ID NO: 1742 - RNA, 110 nt, synthetic construct
  source 1..110: mol_type = other RNA
  modified_base 1..3: mod_base = OTHER; note = 2'O-Methyl ribonucleotide
  modified_base 1..3: mod_base = OTHER; note = Phosphorothioate linkage
  modified_base 108..110: mod_base = OTHER; note = 2'O-Methyl ribonucleotide
  modified_base 107..109: mod_base = OTHER; note = Phosphorothioate linkage
ctacgtgtgtgcgcatgcggtcgttgagaatcgaaagattcttaataaggcatccttccgatgctgacttctcaccgtccgttttccaataggagcgggcggtatgtttt

SEQ ID NO: 1743 - RNA, 110 nt, synthetic construct
  source 1..110: mol_type = other RNA
  modified_base 1..3: mod_base = OTHER; note = 2'O-Methyl ribonucleotide
  modified_base 1..3: mod_base = OTHER; note = Phosphorothioate linkage
  modified_base 108..110: mod_base = OTHER; note = 2'O-Methyl ribonucleotide
  modified_base 107..109: mod_base = OTHER; note = Phosphorothioate linkage
tacgtgtgtgcgcatgcggtcggttgagaatcgaaagattcttaataaggcatccttccgatgctgacttctcaccgtccgttttccaataggagcgggcggtatgtttt

SEQ ID NO: 1744 - RNA, 110 nt, synthetic construct
  source 1..110: mol_type = other RNA
  modified_base 1..3: mod_base = OTHER; note = 2'O-Methyl ribonucleotide
  modified_base 1..3: mod_base = OTHER; note = Phosphorothioate linkage
  modified_base 108..110: mod_base = OTHER; note = 2'O-Methyl ribonucleotide
  modified_base 107..109: mod_base = OTHER; note = Phosphorothioate linkage
cacatcctctttccatttcttcgttgagaatcgaaagattcttaataaggcatccttccgatgctgacttctcaccgtccgttttccaataggagcgggcggtatgtttt

SEQ ID NO: 1745 - DNA, 22 bp, Mus musculus
  source 1..22: mol_type = genomic DNA
ggcagagactatgtgtcccagt

SEQ ID NO: 1746 - DNA, 22 bp, Mus musculus
  source 1..22: mol_type = genomic DNA
ccttgggccaacagctgaagta

SEQ ID NO: 1747 - DNA, 22 bp, Mus musculus
  source 1..22: mol_type = genomic DNA
gaccgcatccacatacacatta

SEQ ID NO: 1748 - DNA, 22 bp, Mus musculus
  source 1..22: mol_type = genomic DNA
accgcatccacatacacattag

SEQ ID NO: 1749 - DNA, 22 bp, Mus musculus
  source 1..22: mol_type = genomic DNA
tccccctctagcctgaatctcc

SEQ ID NO: 1750 - DNA, 22 bp, Mus musculus
  source 1..22: mol_type = genomic DNA
ccccctctagcctgaatctcct

SEQ ID NO: 1751 - DNA, 22 bp, Mus musculus
  source 1..22: mol_type = genomic DNA
tcgggacttctgggataacctg

SEQ ID NO: 1752 - DNA, 22 bp, Mus musculus
  source 1..22: mol_type = genomic DNA
gacttctgggataacctggaga

SEQ ID NO: 1753 - DNA, 22 bp, Mus musculus
  source 1..22: mol_type = genomic DNA
gatgaacaaggacctagaggaa

SEQ ID NO: 1754 - DNA, 22 bp, Mus musculus
  source 1..22: mol_type = genomic DNA
cagaaggtgcagccctacctgg

SEQ ID NO: 1755 - DNA, 22 bp, Mus musculus
  source 1..22: mol_type = genomic DNA
gccctacctggacgaattccag

SEQ ID NO: 1756 - DNA, 22 bp, Mus musculus
  source 1..22: mol_type = genomic DNA
ccctacctggacgaattccaga

SEQ ID NO: 1757 - DNA, 22 bp, Mus musculus
  source 1..22: mol_type = genomic DNA
cctggacgaattccagaagaaa

SEQ ID NO: 1758 - DNA, 22 bp, Mus musculus
  source 1..22: mol_type = genomic DNA
gggagactgtcccctgtggctg

SEQ ID NO: 1759 - DNA, 22 bp, Mus musculus
  source 1..22: mol_type = genomic DNA
ttgaacgagtaccacaccaggg

SEQ ID NO: 1760 - DNA, 22 bp, Mus musculus
  source 1..22: mol_type = genomic DNA
aacccacctgaagacacttggc

SEQ ID NO: 1761 - DNA, 22 bp, Mus musculus
  source 1..22: mol_type = genomic DNA
ctacgtgtgtgcgcatgcggtc

SEQ ID NO: 1762 - DNA, 22 bp, Mus musculus
  source 1..22: mol_type = genomic DNA
tacgtgtgtgcgcatgcggtcg

SEQ ID NO: 1763 - DNA, 22 bp, Mus musculus
  source 1..22: mol_type = genomic DNA
cacatcctctttccatttcttc

SEQ ID NO: 1764 - RNA, 110 nt, synthetic construct
  source 1..110: mol_type = other RNA
  modified_base 1..3: mod_base = OTHER; note = 2'O-Methyl ribonucleotide
  modified_base 1..3: mod_base = OTHER; note = Phosphorothioate linkage
  modified_base 108..110: mod_base = OTHER; note = 2'O-Methyl ribonucleotide
  modified_base 107..109: mod_base = OTHER; note = Phosphorothioate linkage
ttaggggacacctacccgtcaggttgagaatcgaaagattcttaataaggcatccttccgatgctgacttctcaccgtccgttttccaataggagcgggcggtatgtttt

SEQ ID NO: 1765 - RNA, 110 nt, synthetic construct
  source 1..110: mol_type = other RNA
  modified_base 1..3: mod_base = OTHER; note = 2'O-Methyl ribonucleotide
  modified_base 1..3: mod_base = OTHER; note = Phosphorothioate linkage
  modified_base 108..110: mod_base = OTHER; note = 2'O-Methyl ribonucleotide
  modified_base 107..109: mod_base = OTHER; note = Phosphorothioate linkage
aggggacacctacccgtcaggagttgagaatcgaaagattcttaataaggcatccttccgatgctgacttctcaccgtccgttttccaataggagcgggcggtatgtttt

SEQ ID NO: 1766 - RNA, 110 nt, synthetic construct
  source 1..110: mol_type = other RNA
  modified_base 1..3: mod_base = OTHER; note = 2'O-Methyl ribonucleotide
  modified_base 1..3: mod_base = OTHER; note = Phosphorothioate linkage
  modified_base 108..110: mod_base = OTHER; note = 2'O-Methyl ribonucleotide
  modified_base 107..109: mod_base = OTHER; note = Phosphorothioate linkage
ctacccgtcaggaagagcacgggttgagaatcgaaagattcttaataaggcatccttccgatgctgacttctcaccgtccgttttccaataggagcgggcggtatgtttt

SEQ ID NO: 1767 - RNA, 110 nt, synthetic construct
  source 1..110: mol_type = other RNA
  modified_base 1..3: mod_base = OTHER; note = 2'O-Methyl ribonucleotide
  modified_base 1..3: mod_base = OTHER; note = Phosphorothioate linkage
  modified_base 108..110: mod_base = OTHER; note = 2'O-Methyl ribonucleotide
  modified_base 107..109: mod_base = OTHER; note = Phosphorothioate linkage
tacccgtcaggaagagcacggcgttgagaatcgaaagattcttaataaggcatccttccgatgctgacttctcaccgtccgttttccaataggagcgggcggtatgtttt

SEQ ID NO: 1768 - RNA, 110 nt, synthetic construct
  source 1..110: mol_type = other RNA
  modified_base 1..3: mod_base = OTHER; note = 2'O-Methyl ribonucleotide
  modified_base 1..3: mod_base = OTHER; note = Phosphorothioate linkage
  modified_base 108..110: mod_base = OTHER; note = 2'O-Methyl ribonucleotide
  modified_base 107..109: mod_base = OTHER; note = Phosphorothioate linkage
ggtccttactttagctgttttcgttgagaatcgaaagattcttaataaggcatccttccgatgctgacttctcaccgtccgttttccaataggagcgggcggtatgtttt

SEQ ID NO: 1769 - RNA, 110 nt, synthetic construct
  source 1..110: mol_type = other RNA
  modified_base 1..3: mod_base = OTHER; note = 2'O-Methyl ribonucleotide
  modified_base 1..3: mod_base = OTHER; note = Phosphorothioate linkage
  modified_base 108..110: mod_base = OTHER; note = 2'O-Methyl ribonucleotide
  modified_base 107..109: mod_base = OTHER; note = Phosphorothioate linkage
ttactttagctgttttcccaaggttgagaatcgaaagattcttaataaggcatccttccgatgctgacttctcaccgtccgttttccaataggagcgggcggtatgtttt

SEQ ID NO: 1770 - RNA, 110 nt, synthetic construct
  source 1..110: mol_type = other RNA
  modified_base 1..3: mod_base = OTHER; note = 2'O-Methyl ribonucleotide
  modified_base 1..3: mod_base = OTHER; note = Phosphorothioate linkage
  modified_base 108..110: mod_base = OTHER; note = 2'O-Methyl ribonucleotide
  modified_base 107..109: mod_base = OTHER; note = Phosphorothioate linkage
tactttagctgttttcccaagggttgagaatcgaaagattcttaataaggcatccttccgatgctgacttctcaccgtccgttttccaataggagcgggcggtatgtttt

SEQ ID NO: 1771 - RNA, 110 nt, synthetic construct
  source 1..110: mol_type = other RNA
  modified_base 1..3: mod_base = OTHER; note = 2'O-Methyl ribonucleotide
  modified_base 1..3: mod_base = OTHER; note = Phosphorothioate linkage
  modified_base 108..110: mod_base = OTHER; note = 2'O-Methyl ribonucleotide
  modified_base 107..109: mod_base = OTHER; note = Phosphorothioate linkage
actttagctgttttcccaaggcgttgagaatcgaaagattcttaataaggcatccttccgatgctgacttctcaccgtccgttttccaataggagcgggcggtatgtttt

SEQ ID NO: 1772 - RNA, 110 nt, synthetic construct
  source 1..110: mol_type = other RNA
  modified_base 1..3: mod_base = OTHER; note = 2'O-Methyl ribonucleotide
  modified_base 1..3: mod_base = OTHER; note = Phosphorothioate linkage
  modified_base 108..110: mod_base = OTHER; note = 2'O-Methyl ribonucleotide
  modified_base 107..109: mod_base = OTHER; note = Phosphorothioate linkage
ctcccctcccaccctcagggaggttgagaatcgaaagattcttaataaggcatccttccgatgctgacttctcaccgtccgttttccaataggagcgggcggtatgtttt

SEQ ID NO: 1773 - RNA, 110 nt, synthetic construct
  source 1..110: mol_type = other RNA
  modified_base 1..3: mod_base = OTHER; note = 2'O-Methyl ribonucleotide
  modified_base 1..3: mod_base = OTHER; note = Phosphorothioate linkage
  modified_base 108..110: mod_base = OTHER; note = 2'O-Methyl ribonucleotide
  modified_base 107..109: mod_base = OTHER; note = Phosphorothioate linkage
tcccctcccaccctcagggagcgttgagaatcgaaagattcttaataaggcatccttccgatgctgacttctcaccgtccgttttccaataggagcgggcggtatgtttt

SEQ ID NO: 1774 - RNA, 110 nt, synthetic construct
  source 1..110: mol_type = other RNA
  modified_base 1..3: mod_base = OTHER; note = 2'O-Methyl ribonucleotide
  modified_base 1..3: mod_base = OTHER; note = Phosphorothioate linkage
  modified_base 108..110: mod_base = OTHER; note = 2'O-Methyl ribonucleotide
  modified_base 107..109: mod_base = OTHER; note = Phosphorothioate linkage
tcccaccctcagggagccaggcgttgagaatcgaaagattcttaataaggcatccttccgatgctgacttctcaccgtccgttttccaataggagcgggcggtatgtttt

SEQ ID NO: 1775 - DNA, 22 bp, Homo sapiens
  source 1..22: mol_type = genomic DNA
ttaggggacacctacccgtcag

SEQ ID NO: 1776 - DNA, 22 bp, Homo sapiens
  source 1..22: mol_type = genomic DNA
aggggacacctacccgtcagga

SEQ ID NO: 1777 - DNA, 22 bp, Homo sapiens
  source 1..22: mol_type = genomic DNA
ctacccgtcaggaagagcacgg

SEQ ID NO: 1778 - DNA, 22 bp, Homo sapiens
  source 1..22: mol_type = genomic DNA
tacccgtcaggaagagcacggc

SEQ ID NO: 1779 - DNA, 22 bp, Homo sapiens
  source 1..22: mol_type = genomic DNA
ggtccttactttagctgttttc

SEQ ID NO: 1780 - DNA, 22 bp, Homo sapiens
  source 1..22: mol_type = genomic DNA
ttactttagctgttttcccaag

SEQ ID NO: 1781 - DNA, 22 bp, Homo sapiens
  source 1..22: mol_type = genomic DNA
tactttagctgttttcccaagg

SEQ ID NO: 1782 - DNA, 22 bp, Homo sapiens
  source 1..22: mol_type = genomic DNA
actttagctgttttcccaaggc

SEQ ID NO: 1783 - DNA, 22 bp, Homo sapiens
  source 1..22: mol_type = genomic DNA
ctcccctcccaccctcagggag

SEQ ID NO: 1784 - DNA, 22 bp, Homo sapiens
  source 1..22: mol_type = genomic DNA
tcccctcccaccctcagggagc

SEQ ID NO: 1785 - DNA, 22 bp, Homo sapiens
  source 1..22: mol_type = genomic DNA
tcccaccctcagggagccaggc

SEQ ID NO: 1786 - DNA, 38 bp, synthetic construct; identical to SEQ ID NO: 93
  source 1..38: mol_type = other DNA

SEQ ID NO: 1787 - DNA, 35 bp, synthetic construct; identical to SEQ ID NO: 94
  source 1..35: mol_type = other DNA

SEQ ID NO: 1788 - DNA, 2803 bp, synthetic construct
  source 1..2803: mol_type = other DNA
aaaaaaaaaaaaaaaaaaaaaaaaaaaaaaaaaaaaaaaaaaaaaaaaaaaaaaaaaaaaaaaaaaaaaaaaaaaaaaaaaaaaaaaaaaaaaaaaaaaagaagagcaagtcccgaattcactggccgtcgttttacaacgtcgtgactgggaaaaccctggcgttacccaacttaatcgccttgcagcacatccccctttcgccagctggcgtaatagcgaagaggcccgcaccgatcgcccttcccaacagttgcgcagcctgaatggcgaatggcgcctgatgcggtattttctccttacgcatctgtgcggtatttcacaccgcatatggtgcactctcagtacaatctgctctgatgccgcatagttaagccagccccgacacccgccaacacccgctgacgcgccctgacgggcttgtctgctcccggcatccgcttacagacaagctgtgaccgtctccgggagctgcatgtgtcagaggttttcaccgtcatcaccgaaacgcgcgagacgaaagggcctcgtgatacgcctatttttataggttaatgtcatgataataatggtttcttagacgtcaggtggcacttttcggggaaatgtgcgcggaacccctatttgtttatttttctaaatacattcaaatatgtatccgctcatgagacaataaccctgataaatgcttcaataatattgaaaaaggaagagtatgagtattcaacatttccgtgtcgcccttattcccttttttgcggcattttgccttcctgtttttgctcacccagaaacgctggtgaaagtaaaagatgctgaagatcagttgggtgcacgagtgggttacatcgaactggatctcaacagcggtaagatccttgagagttttcgccccgaagaacgttttccaatgatgagcacttttaaagttctgctatgtggcgcggtattatcccgtattgacgccgggcaagagcaactcggtcgccgcatacactattctcagaatgacttggttgagtactcaccagtcacagaaaagcatcttacggatggcatgacagtaagagaattatgcagtgctgccataaccatgagtgataacactgcggccaacttacttctgacaacgatcggaggaccgaaggagctaaccgcttttttgcacaacatgggggatcatgtaactcgccttgatcgttgggaaccggagctgaatgaagccataccaaacgacgagcgtgacaccacgatgcctgtagcaatggcaacaacgttgcgcaaactattaactggcgaactacttactctagcttcccggcaacaattaatagactggatggaggcggataaagttgcaggaccacttctgcgctcggcccttccggctggctggtttattgctgataaatctggagccggtgagcgtgggtctcgcggtatcattgcagcactggggccagatggtaagccctcccgtatcgtagttatctacacgacggggagtcaggcaactatggatgaacgaaatagacagatcgctgagataggtgcctcactgattaagcattggtaactgtcagaccaagtttactcatatatactttagattgatttaaaacttcatttttaatttaaaaggatctaggtgaagatcctttttgataatctcatgaccaaaatcccttaacgtgagttttcgttccactgagcgtcagaccccgtagaaaagatcaaaggatcttcttgagatcctttttttctgcgcgtaatctgctgcttgcaaacaaaaaaaccaccgctaccagcggtggtttgtttgccggatcaagagctaccaactctttttccgaaggtaactggcttcagcagagcgcagataccaaatactgttcttctagtgtagccgtagttaggccaccacttcaagaactctgtagcaccgcctacatacctcgctctgctaatcctgttaccagtggctgctgccagtggcgataagtcgtgtcttaccgggttggactcaagacgatagttaccggataaggcgcagcggtcgggctgaacggggggttcgtgcacacagcccagcttggagcgaacgacctacaccgaactgagatacctacagcgtgagctatgagaaagcgccacgcttcccgaagggagaaaggcggacaggtatccggtaagcggcagggtcggaacaggagagcgcacgagggagcttccagggggaaacgcctggtatctttatagtcctgtcgggtttcgccacctctgacttgagcgtcgatttttgtgatgctcgtcaggggggcggagcctatggaaaaacgccagcaacgcggcctttttacggttcctggccttttgctggccttttgctcacatgttctttcctgcgttatcccctgattctgtggataaccgtattaccgcctttgagtgagctgataccgctcgccgcagccgaacgaccgagcgcagcgagtcagtgagcgaggaagcggaagagcgcccaatacgcaaaccgcctctccccgcgcgttggccgattcattaatgcagctggcacgacaggtttcccgactggaaagcgggcagtgagcgcaacgcaattaatgtgagttagctcactcattaggcaccccaggctttacactttatgcttccggctcgtatgttgtgtggaattgtgagcggataacaatttcacacaggaaacagctatgaccatgattacgccaagcttgcatgcctgcaggtcgactctagaggatcccttgaagactaaaaaaaa

SEQ ID NO: 1789 - RNA, 110 nt, synthetic construct
  source 1..110: mol_type = other RNA
  modified_base 1..3: mod_base = OTHER; note = 2'O-Methyl ribonucleotide
  modified_base 1..3: mod_base = OTHER; note = Phosphorothioate linkage
  modified_base 108..110: mod_base = OTHER; note = 2'O-Methyl ribonucleotide
  modified_base 107..109: mod_base = OTHER; note = Phosphorothioate linkage
gtatgactattacaggtctggggttgagaatcgaaagattcttaataaggcatccttccgatgctgacttctcaccgtccgttttccaataggagcgggcggtatgtttt

SEQ ID NO: 1790 - RNA, 110 nt, synthetic construct
  source 1..110: mol_type = other RNA
  modified_base 1..3: mod_base = OTHER; note = 2'O-Methyl ribonucleotide
  modified_base 1..3: mod_base = OTHER; note = Phosphorothioate linkage
  modified_base 108..110: mod_base = OTHER; note = 2'O-Methyl ribonucleotide
  modified_base 107..109: mod_base = OTHER; note = Phosphorothioate linkage
aaatagcaaagtttcttacctagttgagaatcgaaagattcttaataaggcatccttccgatgctgacttctcaccgtccgttttccaataggagcgggcggtatgtttt

SEQ ID NO: 1791 - RNA, 110 nt, synthetic construct
  source 1..110: mol_type = other RNA
  modified_base 1..3: mod_base = OTHER; note = 2'O-Methyl ribonucleotide
  modified_base 1..3: mod_base = OTHER; note = Phosphorothioate linkage
  modified_base 108..110: mod_base = OTHER; note = 2'O-Methyl ribonucleotide
  modified_base 107..109: mod_base = OTHER; note = Phosphorothioate linkage
taaatagcaaagtttcttacctgttgagaatcgaaagattcttaataaggcatccttccgatgctgacttctcaccgtccgttttccaataggagcgggcggtatgtttt

SEQ ID NO: 1792 - RNA, 110 nt, synthetic construct
  source 1..110: mol_type = other RNA
  modified_base 1..3: mod_base = OTHER; note = 2'O-Methyl ribonucleotide
  modified_base 1..3: mod_base = OTHER; note = Phosphorothioate linkage
  modified_base 108..110: mod_base = OTHER; note = 2'O-Methyl ribonucleotide
  modified_base 107..109: mod_base = OTHER; note = Phosphorothioate linkage
acatccaagcattttctaggtagttgagaatcgaaagattcttaataaggcatccttccgatgctgacttctcaccgtccgttttccaataggagcgggcggtatgtttt

SEQ ID NO: 1793 - RNA, 110 nt, synthetic construct
  source 1..110: mol_type = other RNA
  modified_base 1..3: mod_base = OTHER; note = 2'O-Methyl ribonucleotide
  modified_base 1..3: mod_base = OTHER; note = Phosphorothioate linkage
  modified_base 108..110: mod_base = OTHER; note = 2'O-Methyl ribonucleotide
  modified_base 107..109: mod_base = OTHER; note = Phosphorothioate linkage
ttggcatgctgactctctgtccgttgagaatcgaaagattcttaataaggcatccttccgatgctgacttctcaccgtccgttttccaataggagcgggcggtatgtttt

SEQ ID NO: 1794 - RNA, 110 nt, synthetic construct
  source 1..110: mol_type = other RNA
  modified_base 1..3: mod_base = OTHER; note = 2'O-Methyl ribonucleotide
  modified_base 1..3: mod_base = OTHER; note = Phosphorothioate linkage
  modified_base 108..110: mod_base = OTHER; note = 2'O-Methyl ribonucleotide
  modified_base 107..109: mod_base = OTHER; note = Phosphorothioate linkage
attggcatgctgactctctgtcgttgagaatcgaaagattcttaataaggcatccttccgatgctgacttctcaccgtccgttttccaataggagcgggcggtatgtttt

SEQ ID NO: 1795 - RNA, 110 nt, synthetic construct; identical to SEQ ID NO: 605
  source 1..110: mol_type = other RNA
  modified_base 1..3: mod_base = OTHER; note = 2'O-Methyl ribonucleotide
  modified_base 1..3: mod_base = OTHER; note = Phosphorothioate linkage
  modified_base 108..110: mod_base = OTHER; note = 2'O-Methyl ribonucleotide
  modified_base 107..109: mod_base = OTHER; note = Phosphorothioate linkage

SEQ ID NO: 1796 - RNA, 110 nt, synthetic construct
  source 1..110: mol_type = other RNA
  modified_base 1..3: mod_base = OTHER; note = 2'O-Methyl ribonucleotide
  modified_base 1..3: mod_base = OTHER; note = Phosphorothioate linkage
  modified_base 108..110: mod_base = OTHER; note = 2'O-Methyl ribonucleotide
  modified_base 107..109: mod_base = OTHER; note = Phosphorothioate linkage
cgctggatgcaactgtacatctgttgagaatcgaaagattcttaataaggcatccttccgatgctgacttctcaccgtccgttttccaataggagcgggcggtatgtttt

SEQ ID NO: 1797 - RNA, 110 nt, synthetic construct
  source 1..110: mol_type = other RNA
  modified_base 1..3: mod_base = OTHER; note = 2'O-Methyl ribonucleotide
  modified_base 1..3: mod_base = OTHER; note = Phosphorothioate linkage
  modified_base 108..110: mod_base = OTHER; note = 2'O-Methyl ribonucleotide
  modified_base 107..109: mod_base = OTHER; note = Phosphorothioate linkage
caggtaaggggtgtccacagtcgttgagaatcgaaagattcttaataaggcatccttccgatgctgacttctcaccgtccgttttccaataggagcgggcggtatgtttt

SEQ ID NO: 1798 - RNA, 110 nt, synthetic construct
  source 1..110: mol_type = other RNA
  modified_base 1..3: mod_base = OTHER; note = 2'O-Methyl ribonucleotide
  modified_base 1..3: mod_base = OTHER; note = Phosphorothioate linkage
  modified_base 108..110: mod_base = OTHER; note = 2'O-Methyl ribonucleotide
  modified_base 107..109: mod_base = OTHER; note = Phosphorothioate linkage
attctatgtatctattctaggagttgagaatcgaaagattcttaataaggcatccttccgatgctgacttctcaccgtccgttttccaataggagcgggcggtatgtttt

SEQ ID NO: 1799 - RNA, 110 nt, synthetic construct
  source 1..110: mol_type = other RNA
  modified_base 1..3: mod_base = OTHER; note = 2'O-Methyl ribonucleotide
  modified_base 1..3: mod_base = OTHER; note = Phosphorothioate linkage
  modified_base 108..110: mod_base = OTHER; note = 2'O-Methyl ribonucleotide
  modified_base 107..109: mod_base = OTHER; note = Phosphorothioate linkage
ttctatgtatctattctaggatgttgagaatcgaaagattcttaataaggcatccttccgatgctgacttctcaccgtccgttttccaataggagcgggcggtatgtttt

SEQ ID NO: 1800 - RNA, 110 nt, synthetic construct
  source 1..110: mol_type = other RNA
  modified_base 1..3: mod_base = OTHER; note = 2'O-Methyl ribonucleotide
  modified_base 1..3: mod_base = OTHER; note = Phosphorothioate linkage
  modified_base 108..110: mod_base = OTHER; note = 2'O-Methyl ribonucleotide
  modified_base 107..109: mod_base = OTHER; note = Phosphorothioate linkage
tctatgtatctattctaggatggttgagaatcgaaagattcttaataaggcatccttccgatgctgacttctcaccgtccgttttccaataggagcgggcggtatgtttt

SEQ ID NO: 1801 - RNA, 110 nt, synthetic construct
  source 1..110: mol_type = other RNA
  modified_base 1..3: mod_base = OTHER; note = 2'O-Methyl ribonucleotide
  modified_base 1..3: mod_base = OTHER; note = Phosphorothioate linkage
  modified_base 108..110: mod_base = OTHER; note = 2'O-Methyl ribonucleotide
  modified_base 107..109: mod_base = OTHER; note = Phosphorothioate linkage
tctattctaggatgaaaaacttgttgagaatcgaaagattcttaataaggcatccttccgatgctgacttctcaccgtccgttttccaataggagcgggcggtatgtttt

SEQ ID NO: 1802 - RNA, 110 nt, synthetic construct
  source 1..110: mol_type = other RNA
  modified_base 1..3: mod_base = OTHER; note = 2'O-Methyl ribonucleotide
  modified_base 1..3: mod_base = OTHER; note = Phosphorothioate linkage
  modified_base 108..110: mod_base = OTHER; note = 2'O-Methyl ribonucleotide
  modified_base 107..109: mod_base = OTHER; note = Phosphorothioate linkage
agaaaatgccaaatcattggttgttgagaatcgaaagattcttaataaggcatccttccgatgctgacttctcaccgtccgttttccaataggagcgggcggtatgtttt

SEQ ID NO: 1803 - RNA, 110 nt, synthetic construct
  source 1..110: mol_type = other RNA
  modified_base 1..3: mod_base = OTHER; note = 2'O-Methyl ribonucleotide
  modified_base 1..3: mod_base = OTHER; note = Phosphorothioate linkage
  modified_base 108..110: mod_base = OTHER; note = 2'O-Methyl ribonucleotide
  modified_base 107..109: mod_base = OTHER; note = Phosphorothioate linkage
aaatttcccttaggagaaaatggttgagaatcgaaagattcttaataaggcatccttccgatgctgacttctcaccgtccgttttccaataggagcgggcggtatgtttt

SEQ ID NO: 1804 - RNA, 110 nt, synthetic construct
  source 1..110: mol_type = other RNA
  modified_base 1..3: mod_base = OTHER; note = 2'O-Methyl ribonucleotide
  modified_base 1..3: mod_base = OTHER; note = Phosphorothioate linkage
  modified_base 108..110: mod_base = OTHER; note = 2'O-Methyl ribonucleotide
  modified_base 107..109: mod_base = OTHER; note = Phosphorothioate linkage
gtctccaaaatttcccttaggagttgagaatcgaaagattcttaataaggcatccttccgatgctgacttctcaccgtccgttttccaataggagcgggcggtatgtttt

SEQ ID NO: 1805 - RNA, 110 nt, synthetic construct
  source 1..110: mol_type = other RNA
  modified_base 1..3: mod_base = OTHER; note = 2'O-Methyl ribonucleotide
  modified_base 1..3: mod_base = OTHER; note = Phosphorothioate linkage
  modified_base 108..110: mod_base = OTHER; note = 2'O-Methyl ribonucleotide
  modified_base 107..109: mod_base = OTHER; note = Phosphorothioate linkage
tgtctccaaaatttcccttagggttgagaatcgaaagattcttaataaggcatccttccgatgctgacttctcaccgtccgttttccaataggagcgggcggtatgtttt

SEQ ID NO: 1806 - RNA, 110 nt, synthetic construct
  source 1..110: mol_type = other RNA
  modified_base 1..3: mod_base = OTHER; note = 2'O-Methyl ribonucleotide
  modified_base 1..3: mod_base = OTHER; note = Phosphorothioate linkage
  modified_base 108..110: mod_base = OTHER; note = 2'O-Methyl ribonucleotide
  modified_base 107..109: mod_base = OTHER; note = Phosphorothioate linkage
tgatttggcattttctcctaaggttgagaatcgaaagattcttaataaggcatccttccgatgctgacttctcaccgtccgttttccaataggagcgggcggtatgtttt

SEQ ID NO: 1807 - RNA, 110 nt, synthetic construct
  source 1..110: mol_type = other RNA
  modified_base 1..3: mod_base = OTHER; note = 2'O-Methyl ribonucleotide
  modified_base 1..3: mod_base = OTHER; note = Phosphorothioate linkage
  modified_base 108..110: mod_base = OTHER; note = 2'O-Methyl ribonucleotide
  modified_base 107..109: mod_base = OTHER; note = Phosphorothioate linkage
tcagcaagtccactgttgtctcgttgagaatcgaaagattcttaataaggcatccttccgatgctgacttctcaccgtccgttttccaataggagcgggcggtatgtttt

SEQ ID NO: 1808 - RNA, 110 nt, synthetic construct; identical to SEQ ID NO: 606
  source 1..110: mol_type = other RNA
  modified_base 1..3: mod_base = OTHER; note = 2'O-Methyl ribonucleotide
  modified_base 1..3: mod_base = OTHER; note = Phosphorothioate linkage
  modified_base 108..110: mod_base = OTHER; note = 2'O-Methyl ribonucleotide
  modified_base 107..109: mod_base = OTHER; note = Phosphorothioate linkage

SEQ ID NO: 1809 - RNA, 110 nt, synthetic construct
  source 1..110: mol_type = other RNA
  modified_base 1..3: mod_base = OTHER; note = 2'O-Methyl ribonucleotide
  modified_base 1..3: mod_base = OTHER; note = Phosphorothioate linkage
  modified_base 108..110: mod_base = OTHER; note = 2'O-Methyl ribonucleotide
  modified_base 107..109: mod_base = OTHER; note = Phosphorothioate linkage
attgacatcactgcctattgttgttgagaatcgaaagattcttaataaggcatccttccgatgctgacttctcaccgtccgttttccaataggagcgggcggtatgtttt

SEQ ID NO: 1810 - RNA, 110 nt, synthetic construct
  source 1..110: mol_type = other RNA
  modified_base 1..3: mod_base = OTHER; note = 2'O-Methyl ribonucleotide
  modified_base 1..3: mod_base = OTHER; note = Phosphorothioate linkage
  modified_base 108..110: mod_base = OTHER; note = 2'O-Methyl ribonucleotide
  modified_base 107..109: mod_base = OTHER; note = Phosphorothioate linkage
agtagagaaatgacaaacctctgttgagaatcgaaagattcttaataaggcatccttccgatgctgacttctcaccgtccgttttccaataggagcgggcggtatgtttt

SEQ ID NO: 1811 - RNA, 110 nt, synthetic construct
  source 1..110: mol_type = other RNA
  modified_base 1..3: mod_base = OTHER; note = 2'O-Methyl ribonucleotide
  modified_base 1..3: mod_base = OTHER; note = Phosphorothioate linkage
  modified_base 108..110: mod_base = OTHER; note = 2'O-Methyl ribonucleotide
  modified_base 107..109: mod_base = OTHER; note = Phosphorothioate linkage
aagtagagaaatgacaaacctcgttgagaatcgaaagattcttaataaggcatccttccgatgctgacttctcaccgtccgttttccaataggagcgggcggtatgtttt

SEQ ID NO: 1812 - RNA, 110 nt, synthetic construct; identical to SEQ ID NO: 605
  source 1..110: mol_type = other RNA
  modified_base 1..3: mod_base = OTHER; note = 2'O-Methyl ribonucleotide
  modified_base 1..3: mod_base = OTHER; note = Phosphorothioate linkage
  modified_base 108..110: mod_base = OTHER; note = 2'O-Methyl ribonucleotide
  modified_base 107..109: mod_base = OTHER; note = Phosphorothioate linkage

SEQ ID NO: 1813 - RNA, 110 nt, synthetic construct; identical to SEQ ID NO: 605
  source 1..110: mol_type = other RNA
  modified_base 1..3: mod_base = OTHER; note = 2'O-Methyl ribonucleotide
  modified_base 1..3: mod_base = OTHER; note = Phosphorothioate linkage
  modified_base 105..110: mod_base = OTHER; note = 2'O-Methyl ribonucleotide
  modified_base 105..109: mod_base = OTHER; note = Phosphorothioate linkage

SEQ ID NO: 1814 - RNA, 110 nt, synthetic construct; identical to SEQ ID NO: 605
  source 1..110: mol_type = other RNA
  modified_base 1..3: mod_base = OTHER; note = 2'O-Methyl ribonucleotide
  modified_base 1..3: mod_base = OTHER; note = Phosphorothioate linkage
  modified_base 33..36: mod_base = OTHER; note = 2'O-Methyl ribonucleotide
  modified_base 55..59: mod_base = OTHER; note = 2'O-Methyl ribonucleotide
  modified_base 88..91: mod_base = OTHER; note = 2'O-Methyl ribonucleotide
  modified_base 108..110: mod_base = OTHER; note = 2'O-Methyl ribonucleotide
  modified_base 107..109: mod_base = OTHER; note = Phosphorothioate linkage

SEQ ID NO: 1815 - RNA, 110 nt, synthetic construct; identical to SEQ ID NO: 605
  source 1..110: mol_type = other RNA
  modified_base 1..3: mod_base = OTHER; note = 2'O-Methyl ribonucleotide
  modified_base 1..3: mod_base = OTHER; note = Phosphorothioate linkage
  modified_base 33..36: mod_base = OTHER; note = Phosphorothioate linkage
  modified_base 55..59: mod_base = OTHER; note = Phosphorothioate linkage
  modified_base 88..91: mod_base = OTHER; note = Phosphorothioate linkage
  modified_base 108..110: mod_base = OTHER; note = 2'O-Methyl ribonucleotide
  modified_base 107..109: mod_base = OTHER; note = Phosphorothioate linkage

SEQ ID NO: 1816 - RNA, 110 nt, synthetic construct; identical to SEQ ID NO: 605
  source 1..110: mol_type = other RNA
  modified_base 1..4: mod_base = OTHER; note = 2'O-Methyl ribonucleotide
  modified_base 1..4: mod_base = OTHER; note = Phosphorothioate linkage
  modified_base 33..36: mod_base = OTHER; note = 2'O-Methyl ribonucleotide
  modified_base 33..36: mod_base = OTHER; note = Phosphorothioate linkage
  modified_base 55..59: mod_base = OTHER; note = 2'O-Methyl ribonucleotide
  modified_base 55..59: mod_base = OTHER; note = Phosphorothioate linkage
  modified_base 88..91: mod_base = OTHER; note = 2'O-Methyl ribonucleotide
  modified_base 88..91: mod_base = OTHER; note = Phosphorothioate linkage
  modified_base 105..110: mod_base = OTHER; note = 2'O-Methyl ribonucleotide
  modified_base 104..109: mod_base = OTHER; note = Phosphorothioate linkage

SEQ ID NO: 1817 - RNA, 110 nt, synthetic construct; identical to SEQ ID NO: 605
  source 1..110: mol_type = other RNA
  modified_base 1..4: mod_base = OTHER; note = 2'O-Methyl ribonucleotide
  modified_base 1..4: mod_base = OTHER; note = Phosphorothioate linkage
  modified_base 5..21: mod_base = OTHER; note = 2'Fluoro ribonucleotide
  modified_base 33..36: mod_base = OTHER; note = Phosphorothioate linkage
  modified_base 55..59: mod_base = OTHER; note = Phosphorothioate linkage
  modified_base 88..91: mod_base = OTHER; note = Phosphorothioate linkage
  modified_base 105..110: mod_base = OTHER; note = 2'O-Methyl ribonucleotide
  modified_base 104..109: mod_base = OTHER; note = Phosphorothioate linkage

SEQ ID NO: 1818 - RNA, 110 nt, synthetic construct; identical to SEQ ID NO: 605
  source 1..110: mol_type = other RNA
  modified_base 1..4: mod_base = OTHER; note = 2'O-Methyl ribonucleotide
  modified_base 1..4: mod_base = OTHER; note = Phosphorothioate linkage
  modified_base 5..21: mod_base = OTHER; note = 2'Fluoro ribonucleotide
  modified_base 33..36: mod_base = OTHER; note = 2'O-Methyl ribonucleotide
  modified_base 33..36: mod_base = OTHER; note = Phosphorothioate linkage
  modified_base 55..59: mod_base = OTHER; note = 2'O-Methyl ribonucleotide
  modified_base 55..59: mod_base = OTHER; note = Phosphorothioate linkage
  modified_base 88..91: mod_base = OTHER; note = 2'O-Methyl ribonucleotide
  modified_base 88..91: mod_base = OTHER; note = Phosphorothioate linkage
  modified_base 105..110: mod_base = OTHER; note = 2'O-Methyl ribonucleotide
  modified_base 105..109: mod_base = OTHER; note = Phosphorothioate linkage

SEQ ID NO: 1819 - RNA, 110 nt, synthetic construct; identical to SEQ ID NO: 605
  source 1..110: mol_type = other RNA
  modified_base 1..3: mod_base = OTHER; note = 2'O-Methyl ribonucleotide
  modified_base 1..3: mod_base = OTHER; note = Phosphorothioate linkage
  modified_base 33..36: mod_base = OTHER; note = 2'O-Methyl ribonucleotide
  modified_base 55..59: mod_base = OTHER; note = 2'O-Methyl ribonucleotide
  modified_base 88..91: mod_base = OTHER; note = 2'O-Methyl ribonucleotide
  modified_base 105..110: mod_base = OTHER; note = 2'O-Methyl ribonucleotide
  modified_base 104..109: mod_base = OTHER; note = Phosphorothioate linkage

SEQ ID NO: 1820 - RNA, 110 nt, synthetic construct; identical to SEQ ID NO: 605
  source 1..110: mol_type = other RNA
  modified_base 1..3: mod_base = OTHER; note = 2'O-Methyl ribonucleotide
  modified_base 1..3: mod_base = OTHER; note = Phosphorothioate linkage
  modified_base 33..36: mod_base = OTHER; note = Phosphorothioate linkage
  modified_base 55..59: mod_base = OTHER; note = Phosphorothioate linkage
  modified_base 88..91: mod_base = OTHER; note = Phosphorothioate linkage
  modified_base 105..110: mod_base = OTHER; note = 2'O-Methyl ribonucleotide
  modified_base 104..109: mod_base = OTHER; note = Phosphorothioate linkage

SEQ ID NO: 1821 - RNA, 110 nt, synthetic construct; identical to SEQ ID NO: 605
  source 1..110: mol_type = other RNA
  modified_base 1..3: mod_base = OTHER; note = 2'O-Methyl ribonucleotide
  modified_base 1..3: mod_base = OTHER; note = Phosphorothioate linkage
  modified_base 108..110: mod_base = OTHER; note = 2'O-Methyl ribonucleotide
  modified_base 107..109: mod_base = OTHER; note = Phosphorothioate linkage

SEQ ID NO: 1822 - RNA, 110 nt, synthetic construct; identical to SEQ ID NO: 605
  source 1..110: mol_type = other RNA
  modified_base 1..4: mod_base = OTHER; note = 2'O-Methyl ribonucleotide
  modified_base 1..4: mod_base = OTHER; note = Phosphorothioate linkage
  modified_base 33..36: mod_base = OTHER; note = 2'O-Methyl ribonucleotide
  modified_base 33..36: mod_base = OTHER; note = Phosphorothioate linkage
  modified_base 55..59: mod_base = OTHER; note = 2'O-Methyl ribonucleotide
  modified_base 55..59: mod_base = OTHER; note = Phosphorothioate linkage
  modified_base 88..91: mod_base = OTHER; note = 2'O-Methyl ribonucleotide
  modified_base 88..91: mod_base = OTHER; note = Phosphorothioate linkage
  modified_base 105..110: mod_base = OTHER; note = 2'O-Methyl ribonucleotide
  modified_base 104..109: mod_base = OTHER; note = Phosphorothioate linkage

SEQ ID NO: 1823 - RNA, 110 nt, synthetic construct; identical to SEQ ID NO: 605
  source 1..110: mol_type = other RNA
  modified_base 1..4: mod_base = OTHER; note = 2'O-Methyl ribonucleotide
  modified_base 1..4: mod_base = OTHER; note = Phosphorothioate linkage
  modified_base 5..21: mod_base = OTHER; note = 2'Fluoro ribonucleotide
  modified_base 33..36: mod_base = OTHER; note = Phosphorothioate linkage
  modified_base 55..59: mod_base = OTHER; note = Phosphorothioate linkage
  modified_base 88..91: mod_base = OTHER; note = Phosphorothioate linkage
  modified_base 105..110: mod_base = OTHER; note = 2'O-Methyl ribonucleotide
  modified_base 104..109: mod_base = OTHER; note = Phosphorothioate linkage

SEQ ID NO: 1824 - RNA, 110 nt, synthetic construct; identical to SEQ ID NO: 605
  source 1..110: mol_type = other RNA
  modified_base 1..4: mod_base = OTHER; note = 2'O-Methyl ribonucleotide
  modified_base 1..4: mod_base = OTHER; note = Phosphorothioate linkage
  modified_base 5..21: mod_base = OTHER; note = 2'Fluoro ribonucleotide
  modified_base 33..36: mod_base = OTHER; note = 2'O-Methyl ribonucleotide
  modified_base 33..36: mod_base = OTHER; note = Phosphorothioate linkage
  modified_base 55..59: mod_base = OTHER; note = 2'O-Methyl ribonucleotide
  modified_base 55..59: mod_base = OTHER; note = Phosphorothioate linkage
  modified_base 88..91: mod_base = OTHER; note = 2'O-Methyl ribonucleotide
  modified_base 88..91: mod_base = OTHER; note = Phosphorothioate linkage
  modified_base 105..110: mod_base = OTHER; note = 2'O-Methyl ribonucleotide
  modified_base 105..109: mod_base = OTHER; note = Phosphorothioate linkage

SEQ ID NO: 1825 - RNA, 110 nt, synthetic construct; identical to SEQ ID NO: 606
  source 1..110: mol_type = other RNA
  modified_base 1..3: mod_base = OTHER; note = 2'O-Methyl ribonucleotide
  modified_base 1..3: mod_base = OTHER; note = Phosphorothioate linkage
  modified_base 108..110: mod_base = OTHER; note = 2'O-Methyl ribonucleotide
  modified_base 107..109: mod_base = OTHER; note = Phosphorothioate linkage

SEQ ID NO: 1826 - RNA, 110 nt, synthetic construct; identical to SEQ ID NO: 606
  source 1..110: mol_type = other RNA
  modified_base 1..4: mod_base = OTHER; note = 2'O-Methyl ribonucleotide
  modified_base 1..4: mod_base = OTHER; note = Phosphorothioate linkage
  modified_base 33..36: mod_base = OTHER; note = 2'O-Methyl ribonucleotide
  modified_base 33..36: mod_base = OTHER; note = Phosphorothioate linkage
  modified_base 55..59: mod_base = OTHER; note = 2'O-Methyl ribonucleotide
  modified_base 55..59: mod_base = OTHER; note = Phosphorothioate linkage
  modified_base 88..91: mod_base = OTHER; note = 2'O-Methyl ribonucleotide
  modified_base 88..91: mod_base = OTHER; note = Phosphorothioate linkage
  modified_base 105..110: mod_base = OTHER; note = 2'O-Methyl ribonucleotide
  modified_base 105..109: mod_base = OTHER; note = Phosphorothioate linkage

SEQ ID NO: 1827 - RNA, 110 nt, synthetic construct
  source 1..110: mol_type = other RNA
catgttgttcataatcattgatgttgagaatcgaaagattcttaataaggcatccttccgatgctgacttctcaccgtccgttttccaataggagcgggcggtatgtttt

SEQ ID NO: 1828 - RNA, 110 nt, synthetic construct
  source 1..110: mol_type = other RNA
atcaatgattatgaacaacatggttgagaatcgaaagattcttaataaggcatccttccgatgctgacttctcaccgtccgttttccaataggagcgggcggtatgtttt

SEQ ID NO: 1829 - RNA, 110 nt, synthetic construct
  source 1..110: mol_type = other RNA
acaacatgctaaatcagtacttgttgagaatcgaaagattcttaataaggcatccttccgatgctgacttctcaccgtccgttttccaataggagcgggcggtatgtttt

SEQ ID NO: 1830 - RNA, 110 nt, synthetic construct
  source 1..110: mol_type = other RNA
atatgactattacaggtctggggttgagaatcgaaagattcttaataaggcatccttccgatgctgacttctcaccgtccgttttccaataggagcgggcggtatgtttt

SEQ ID NO: 1831 - RNA, 110 nt, synthetic construct
  source 1..110: mol_type = other RNA
acaggtctggggcaaatgatgagttgagaatcgaaagattcttaataaggcatccttccgatgctgacttctcaccgtccgttttccaataggagcgggcggtatgtttt

SEQ ID NO: 1832 - RNA, 110 nt, synthetic construct
  source 1..110: mol_type = other RNA
gaaaatgctgcaatattatcaggttgagaatcgaaagattcttaataaggcatccttccgatgctgacttctcaccgtccgttttccaataggagcgggcggtatgtttt

SEQ ID NO: 1833 - RNA, 110 nt, synthetic construct
  source 1..110: mol_type = other RNA
aaaaaataaattttcttacctggttgagaatcgaaagattcttaataaggcatccttccgatgctgacttctcaccgtccgttttccaataggagcgggcggtatgtttt

SEQ ID NO: 1834 - RNA, 110 nt, synthetic construct
  source 1..110: mol_type = other RNA
taaaaaataaattttcttacctgttgagaatcgaaagattcttaataaggcatccttccgatgctgacttctcaccgtccgttttccaataggagcgggcggtatgtttt

SEQ ID NO: 1835 - RNA, 110 nt, synthetic construct
  source 1..110: mol_type = other RNA
atattgcagcattttccaggtagttgagaatcgaaagattcttaataaggcatccttccgatgctgacttctcaccgtccgttttccaataggagcgggcggtatgtttt

SEQ ID NO: 1836 - RNA, 110 nt, synthetic construct
  source 1..110: mol_type = other RNA
caaggatgctccggaatgttgcgttgagaatcgaaagattcttaataaggcatccttccgatgctgacttctcaccgtccgttttccaataggagcgggcggtatgtttt

SEQ ID NO: 1837 - RNA, 110 nt, synthetic construct
  source 1..110: mol_type = other RNA
ttggcatgctgaccctctgtccgttgagaatcgaaagattcttaataaggcatccttccgatgctgacttctcaccgtccgttttccaataggagcgggcggtatgtttt

SEQ ID NO: 1838 - RNA, 110 nt, synthetic construct
  source 1..110: mol_type = other RNA
attggcatgctgaccctctgtcgttgagaatcgaaagattcttaataaggcatccttccgatgctgacttctcaccgtccgttttccaataggagcgggcggtatgtttt

SEQ ID NO: 1839 - RNA, 110 nt, synthetic construct
  source 1..110: mol_type = other RNA
gttcccagggactgacaggctggttgagaatcgaaagattcttaataaggcatccttccgatgctgacttctcaccgtccgttttccaataggagcgggcggtatgtttt

SEQ ID NO: 1840 - RNA, 110 nt, synthetic construct
  source 1..110: mol_type = other RNA
caggtaaggtgtgtccactgtcgttgagaatcgaaagattcttaataaggcatccttccgatgctgacttctcaccgtccgttttccaataggagcgggcggtatgtttt

SEQ ID NO: 1841 - RNA, 110 nt, synthetic construct
  source 1..110: mol_type = other RNA
ctggatgatgtgcgtaacagatgttgagaatcgaaagattcttaataaggcatccttccgatgctgacttctcaccgtccgttttccaataggagcgggcggtatgtttt

SEQ ID NO: 1842 - RNA, 110 nt, synthetic construct
  source 1..110: mol_type = other RNA
ctggtttcaaaatttttcatccgttgagaatcgaaagattcttaataaggcatccttccgatgctgacttctcaccgtccgttttccaataggagcgggcggtatgtttt

SEQ ID NO: 1843 - RNA, 110 nt, synthetic construct
  source 1..110: mol_type = other RNA
actggtttcaaaatttttcatcgttgagaatcgaaagattcttaataaggcatccttccgatgctgacttctcaccgtccgttttccaataggagcgggcggtatgtttt

SEQ ID NO: 1844 - RNA, 110 nt, synthetic construct
  source 1..110: mol_type = other RNA
ttatgcatttcttattttaggagttgagaatcgaaagattcttaataaggcatccttccgatgctgacttctcaccgtccgttttccaataggagcgggcggtatgtttt

SEQ ID NO: 1845 - RNA, 110 nt, synthetic construct
  source 1..110: mol_type = other RNA
tatgcatttcttattttaggatgttgagaatcgaaagattcttaataaggcatccttccgatgctgacttctcaccgtccgttttccaataggagcgggcggtatgtttt

SEQ ID NO: 1846 - RNA, 110 nt, synthetic construct
  source 1..110: mol_type = other RNA
atgcatttcttattttaggatggttgagaatcgaaagattcttaataaggcatccttccgatgctgacttctcaccgtccgttttccaataggagcgggcggtatgtttt

SEQ ID NO: 1847 - RNA, 110 nt, synthetic construct
  source 1..110: mol_type = other RNA
cttattttaggatgaaaaatttgttgagaatcgaaagattcttaataaggcatccttccgatgctgacttctcaccgtccgttttccaataggagcgggcggtatgtttt

SEQ ID NO: 1848 - RNA, 110 nt, synthetic construct
  source 1..110: mol_type = other RNA
gaaaatgataaagtactggtttgttgagaatcgaaagattcttaataaggcatccttccgatgctgacttctcaccgtccgttttccaataggagcgggcggtatgtttt

SEQ ID NO: 1849 - RNA, 110 nt, synthetic construct
  source 1..110: mol_type = other RNA
agaaaatgataaagtactggttgttgagaatcgaaagattcttaataaggcatccttccgatgctgacttctcaccgtccgttttccaataggagcgggcggtatgtttt

SEQ ID NO: 1850 - RNA, 110 nt, synthetic construct
  source 1..110: mol_type = other RNA
aaattttcctcaggagaaaatggttgagaatcgaaagattcttaataaggcatccttccgatgctgacttctcaccgtccgttttccaataggagcgggcggtatgtttt

SEQ ID NO: 1851 - RNA, 110 nt, synthetic construct
  source 1..110: mol_type = other RNA
gtctccaaaattttcctcaggagttgagaatcgaaagattcttaataaggcatccttccgatgctgacttctcaccgtccgttttccaataggagcgggcggtatgtttt

SEQ ID NO: 1852 - RNA, 110 nt, synthetic construct
  source 1..110: mol_type = other RNA
cgtctccaaaattttcctcagggttgagaatcgaaagattcttaataaggcatccttccgatgctgacttctcaccgtccgttttccaataggagcgggcggtatgtttt

SEQ ID NO: 1853 - RNA, 110 nt, synthetic construct
  source 1..110: mol_type = other RNA
gtactttatcattttctcctgagttgagaatcgaaagattcttaataaggcatccttccgatgctgacttctcaccgtccgttttccaataggagcgggcggtatgtttt

SEQ ID NO: 1854 - RNA, 110 nt, synthetic construct
  source 1..110: mol_type = other RNA
tactttatcattttctcctgaggttgagaatcgaaagattcttaataaggcatccttccgatgctgacttctcaccgtccgttttccaataggagcgggcggtatgtttt

SEQ ID NO: 1855 - RNA, 110 nt, synthetic construct
  source 1..110: mol_type = other RNA
gcagcaagtccactgtcgtctcgttgagaatcgaaagattcttaataaggcatccttccgatgctgacttctcaccgtccgttttccaataggagcgggcggtatgtttt

SEQ ID NO: 1856 - RNA, 110 nt, synthetic construct
  source 1..110: mol_type = other RNA
tgcagcaagtccactgtcgtctgttgagaatcgaaagattcttaataaggcatccttccgatgctgacttctcaccgtccgttttccaataggagcgggcggtatgtttt

SEQ ID NO: 1857 - RNA, 110 nt, synthetic construct
  source 1..110: mol_type = other RNA
agtggacttgctgcatatgtgggttgagaatcgaaagattcttaataaggcatccttccgatgctgacttctcaccgtccgttttccaataggagcgggcggtatgtttt

SEQ ID NO: 1858 - RNA, 110 nt, synthetic construct
  source 1..110: mol_type = other RNA
ccatctatcagctgggaagatagttgagaatcgaaagattcttaataaggcatccttccgatgctgacttctcaccgtccgttttccaataggagcgggcggtatgtttt

SEQ ID NO: 1859 - RNA, 110 nt, synthetic construct
  source 1..110: mol_type = other RNA
actgacatcattgccaattgttgttgagaatcgaaagattcttaataaggcatccttccgatgctgacttctcaccgtccgttttccaataggagcgggcggtatgtttt

SEQ ID NO: 1860 - RNA, 110 nt, synthetic construct
  source 1..110: mol_type = other RNA
gtagagaaataaacgaacctctgttgagaatcgaaagattcttaataaggcatccttccgatgctgacttctcaccgtccgttttccaataggagcgggcggtatgtttt

SEQ ID NO: 1861 - RNA, 110 nt, synthetic construct
  source 1..110: mol_type = other RNA
agtagagaaataaacgaacctcgttgagaatcgaaagattcttaataaggcatccttccgatgctgacttctcaccgtccgttttccaataggagcgggcggtatgtttt

SEQ ID NO: 1862 - RNA, 110 nt, synthetic construct; identical to SEQ ID NO: 1835
  source 1..110: mol_type = other RNA
  modified_base 1..3: mod_base = OTHER; note = 2'O-Methyl ribonucleotide
  modified_base 1..3: mod_base = OTHER; note = Phosphorothioate linkage
  modified_base 108..110: mod_base = OTHER; note = 2'O-Methyl ribonucleotide
  modified_base 107..109: mod_base = OTHER; note = Phosphorothioate linkage

SEQ ID NO: 1863 - RNA, 110 nt, synthetic construct; identical to SEQ ID NO: 1849
  source 1..110: mol_type = other RNA
  modified_base 1..3: mod_base = OTHER; note = 2'O-Methyl ribonucleotide
  modified_base 1..3: mod_base = OTHER; note = Phosphorothioate linkage
  modified_base 108..110: mod_base = OTHER; note = 2'O-Methyl ribonucleotide
  modified_base 107..109: mod_base = OTHER; note = Phosphorothioate linkage

SEQ ID NO: 1864 - RNA, 110 nt, synthetic construct; identical to SEQ ID NO: 1858
  source 1..110: mol_type = other RNA
  modified_base 1..3: mod_base = OTHER; note = 2'O-Methyl ribonucleotide
  modified_base 1..3: mod_base = OTHER; note = Phosphorothioate linkage
  modified_base 108..110: mod_base = OTHER; note = 2'O-Methyl ribonucleotide
  modified_base 107..109: mod_base = OTHER; note = Phosphorothioate linkage

SEQ ID NO: 1865 - RNA, 110 nt, synthetic construct; identical to SEQ ID NO: 1861
  source 1..110: mol_type = other RNA
  modified_base 1..3: mod_base = OTHER; note = 2'O-Methyl ribonucleotide
  modified_base 1..3: mod_base = OTHER; note = Phosphorothioate linkage
  modified_base 108..110: mod_base = OTHER; note = 2'O-Methyl ribonucleotide
  modified_base 107..109: mod_base = OTHER; note = Phosphorothioate linkage

SEQ ID NO: 1866 - RNA, 110 nt, synthetic construct
  source 1..110: mol_type = other RNA
tctcccctccatccccagggaggttgagaatcgaaagattcttaataaggcatccttccgatgctgacttctcaccgtccgttttccaataggagcgggcggtatgtttt

SEQ ID NO: 1867 - RNA, 110 nt, synthetic construct
  source 1..110: mol_type = other RNA
ctcccctccatccccagggagcgttgagaatcgaaagattcttaataaggcatccttccgatgctgacttctcaccgtccgttttccaataggagcgggcggtatgtttt

SEQ ID NO: 1868 - RNA, 110 nt, synthetic construct
  source 1..110: mol_type = other RNA
ctccatccccagggagccaggcgttgagaatcgaaagattcttaataaggcatccttccgatgctgacttctcaccgtccgttttccaataggagcgggcggtatgtttt

SEQ ID NO: 1869 - RNA, 110 nt, synthetic construct
  source 1..110: mol_type = other RNA
acgtatggcagcaagatgaaccgttgagaatcgaaagattcttaataaggcatccttccgatgctgacttctcaccgtccgttttccaataggagcgggcggtatgtttt

SEQ ID NO: 1870 - RNA, 110 nt, synthetic construct
  source 1..110: mol_type = other RNA
agcaagatgaaccccagtcccagttgagaatcgaaagattcttaataaggcatccttccgatgctgacttctcaccgtccgttttccaataggagcgggcggtatgtttt

SEQ ID NO: 1871 - RNA, 110 nt, synthetic construct
  source 1..110: mol_type = other RNA
cccagtcccaatgggacaaagtgttgagaatcgaaagattcttaataaggcatccttccgatgctgacttctcaccgtccgttttccaataggagcgggcggtatgtttt

SEQ ID NO: 1872 - RNA, 110 nt, synthetic construct
  source 1..110: mol_type = other RNA
ccagtcccaatgggacaaagtggttgagaatcgaaagattcttaataaggcatccttccgatgctgacttctcaccgtccgttttccaataggagcgggcggtatgtttt

SEQ ID NO: 1873 - RNA, 110 nt, synthetic construct
  source 1..110: mol_type = other RNA
ggatgcggtcaaagacagcggcgttgagaatcgaaagattcttaataaggcatccttccgatgctgacttctcaccgtccgttttccaataggagcgggcggtatgtttt

SEQ ID NO: 1874 - RNA, 110 nt, synthetic construct
  source 1..110: mol_type = other RNA
acagcggcagagactatgtgtcgttgagaatcgaaagattcttaataaggcatccttccgatgctgacttctcaccgtccgttttccaataggagcgggcggtatgtttt

SEQ ID NO: 1875 - RNA, 110 nt, synthetic construct
  source 1..110: mol_type = other RNA
gtcccagtttgaatcctcctccgttgagaatcgaaagattcttaataaggcatccttccgatgctgacttctcaccgtccgttttccaataggagcgggcggtatgtttt

SEQ ID NO: 1876 - RNA, 110 nt, synthetic construct
  source 1..110: mol_type = other RNA
aggtctttccttacttcagctggttgagaatcgaaagattcttaataaggcatccttccgatgctgacttctcaccgtccgttttccaataggagcgggcggtatgtttt

SEQ ID NO: 1877 - RNA, 110 nt, synthetic construct
  source 1..110: mol_type = other RNA
acttcagctgttggcccaaggagttgagaatcgaaagattcttaataaggcatccttccgatgctgacttctcaccgtccgttttccaataggagcgggcggtatgtttt

SEQ ID NO: 1878 - RNA, 110 nt, synthetic construct
  source 1..110: mol_type = other RNA
cttcagctgttggcccaaggaggttgagaatcgaaagattcttaataaggcatccttccgatgctgacttctcaccgtccgttttccaataggagcgggcggtatgtttt

SEQ ID NO: 1879 - RNA, 110 nt, synthetic construct
  source 1..110: mol_type = other RNA
ggcccaaggaggaggattcaaagttgagaatcgaaagattcttaataaggcatccttccgatgctgacttctcaccgtccgttttccaataggagcgggcggtatgtttt

SEQ ID NO: 1880 - RNA, 110 nt, synthetic construct
  source 1..110: mol_type = other RNA
aggaggattcaaactgggacacgttgagaatcgaaagattcttaataaggcatccttccgatgctgacttctcaccgtccgttttccaataggagcgggcggtatgtttt

SEQ ID NO: 1881 - RNA, 110 nt, synthetic construct
  source 1..110: mol_type = other RNA
cgaaatccttcactttgtcccagttgagaatcgaaagattcttaataaggcatccttccgatgctgacttctcaccgtccgttttccaataggagcgggcggtatgtttt

SEQ ID NO: 1882 - RNA, 110 nt, synthetic construct
  source 1..110: mol_type = other RNA
gaaatccttcactttgtcccatgttgagaatcgaaagattcttaataaggcatccttccgatgctgacttctcaccgtccgttttccaataggagcgggcggtatgtttt

SEQ ID NO: 1883 - RNA, 110 nt, synthetic construct
  source 1..110: mol_type = other RNA
ccttcactttgtcccattgggagttgagaatcgaaagattcttaataaggcatccttccgatgctgacttctcaccgtccgttttccaataggagcgggcggtatgtttt

SEQ ID NO: 1884 - RNA, 110 nt, synthetic construct
  source 1..110: mol_type = other RNA
cttcactttgtcccattgggacgttgagaatcgaaagattcttaataaggcatccttccgatgctgacttctcaccgtccgttttccaataggagcgggcggtatgtttt

SEQ ID NO: 1885 - RNA, 110 nt, synthetic construct
  source 1..110: mol_type = other RNA
ttcactttgtcccattgggactgttgagaatcgaaagattcttaataaggcatccttccgatgctgacttctcaccgtccgttttccaataggagcgggcggtatgtttt

SEQ ID NO: 1886 - RNA, 110 nt, synthetic construct
  source 1..110: mol_type = other RNA
ttcatcttgctgccatacgtgcgttgagaatcgaaagattcttaataaggcatccttccgatgctgacttctcaccgtccgttttccaataggagcgggcggtatgtttt

SEQ ID NO: 1887 - RNA, 110 nt, synthetic construct
  source 1..110: mol_type = other RNA
cttgctgccatacgtgccaagcgttgagaatcgaaagattcttaataaggcatccttccgatgctgacttctcaccgtccgttttccaataggagcgggcggtatgtttt

SEQ ID NO: 1888 - RNA, 110 nt, synthetic construct
  source 1..110: mol_type = other RNA
atacgtgccaagcctggctcccgttgagaatcgaaagattcttaataaggcatccttccgatgctgacttctcaccgtccgttttccaataggagcgggcggtatgtttt

SEQ ID NO: 1889 - RNA, 110 nt, synthetic construct
  source 1..110: mol_type = other RNA
ctagcctgaatctcctggaaaagttgagaatcgaaagattcttaataaggcatccttccgatgctgacttctcaccgtccgttttccaataggagcgggcggtatgtttt

SEQ ID NO: 1890 - RNA, 110 nt, synthetic construct
  source 1..110: mol_type = other RNA
  modified_base 1..3: mod_base = OTHER; note = 2'O-Methyl ribonucleotide
  modified_base 1..3: mod_base = OTHER; note = Phosphorothioate linkage
  modified_base 108..110: mod_base = OTHER; note = 2'O-Methyl ribonucleotide
  modified_base 107..109: mod_base = OTHER; note = Phosphorothioate linkage
tctcctggaaaactgggacactgttgagaatcgaaagattcttaataaggcatccttccgatgctgacttctcaccgtccgttttccaataggagcgggcggtatgtttt

SEQ ID NO: 1891 - RNA, 110 nt, synthetic construct
  source 1..110: mol_type = other RNA
ctcctggaaaactgggacactcgttgagaatcgaaagattcttaataaggcatccttccgatgctgacttctcaccgtccgttttccaataggagcgggcggtatgtttt

SEQ ID NO: 1892 - RNA, 110 nt, synthetic construct
  source 1..110: mol_type = other RNA
gggttcaaccgttagtcagctggttgagaatcgaaagattcttaataaggcatccttccgatgctgacttctcaccgtccgttttccaataggagcgggcggtatgtttt

SEQ ID NO: 1893 - RNA, 110 nt, synthetic construct
  source 1..110: mol_type = other RNA
cgttagtcagctgcaggaacgggttgagaatcgaaagattcttaataaggcatccttccgatgctgacttctcaccgtccgttttccaataggagcgggcggtatgtttt

SEQ ID NO: 1894 - RNA, 110 nt, synthetic construct
  source 1..110: mol_type = other RNA
gttagtcagctgcaggaacggcgttgagaatcgaaagattcttaataaggcatccttccgatgctgacttctcaccgtccgttttccaataggagcgggcggtatgtttt

SEQ ID NO: 1895 - RNA, 110 nt, synthetic construct
  source 1..110: mol_type = other RNA
  modified_base 1..3: mod_base = OTHER; note = 2'O-Methyl ribonucleotide
  modified_base 1..3: mod_base = OTHER; note = Phosphorothioate linkage
  modified_base 108..110: mod_base = OTHER; note = 2'O-Methyl ribonucleotide
  modified_base 107..109: mod_base = OTHER; note = Phosphorothioate linkage
aggaacggctgggcccattgacgttgagaatcgaaagattcttaataaggcatccttccgatgctgacttctcaccgtccgttttccaataggagcgggcggtatgtttt

SEQ ID NO: 1896 - RNA, 110 nt, synthetic construct
  source 1..110: mol_type = other RNA
  modified_base 1..3: mod_base = OTHER; note = 2'O-Methyl ribonucleotide
  modified_base 1..3: mod_base = OTHER; note = Phosphorothioate linkage
  modified_base 108..110: mod_base = OTHER; note = 2'O-Methyl ribonucleotide
  modified_base 107..109: mod_base = OTHER; note = Phosphorothioate linkage
ggaacggctgggcccattgactgttgagaatcgaaagattcttaataaggcatccttccgatgctgacttctcaccgtccgttttccaataggagcgggcggtatgtttt

SEQ ID NO: 1897 - RNA, 110 nt, synthetic construct
  source 1..110: mol_type = other RNA
tgggcccattgactcgggacttgttgagaatcgaaagattcttaataaggcatccttccgatgctgacttctcaccgtccgttttccaataggagcgggcggtatgtttt

SEQ ID NO: 1898 - RNA, 110 nt, synthetic construct
  source 1..110: mol_type = other RNA
  modified_base 1..3: mod_base = OTHER; note = 2'O-Methyl ribonucleotide
  modified_base 1..3: mod_base = OTHER; note = Phosphorothioate linkage
  modified_base 108..110: mod_base = OTHER; note = 2'O-Methyl ribonucleotide
  modified_base 107..109: mod_base = OTHER; note = Phosphorothioate linkage
ctgggataacctggagaaagaagttgagaatcgaaagattcttaataaggcatccttccgatgctgacttctcaccgtccgttttccaataggagcgggcggtatgtttt

SEQ ID NO: 1899 - RNA, 110 nt, synthetic construct
  source 1..110: mol_type = other RNA
attgggtgagacaggagatgaagttgagaatcgaaagattcttaataaggcatccttccgatgctgacttctcaccgtccgttttccaataggagcgggcggtatgtttt

SEQ ID NO: 1900 - RNA, 110 nt, synthetic construct
  source 1..110: mol_type = other RNA
  modified_base 1..3: mod_base = OTHER; note = 2'O-Methyl ribonucleotide
  modified_base 1..3: mod_base = OTHER; note = Phosphorothioate linkage
  modified_base 108..110: mod_base = OTHER; note = 2'O-Methyl ribonucleotide
  modified_base 107..109: mod_base = OTHER; note = Phosphorothioate linkage
ttgggtgagacaggagatgaacgttgagaatcgaaagattcttaataaggcatccttccgatgctgacttctcaccgtccgttttccaataggagcgggcggtatgtttt

SEQ ID NO: 1901 - RNA, 110 nt, synthetic construct
  source 1..110: mol_type = other RNA
ggacctagaggaagtgaaacaggttgagaatcgaaagattcttaataaggcatccttccgatgctgacttctcaccgtccgttttccaataggagcgggcggtatgtttt

SEQ ID NO: 1902 - RNA, 110 nt, synthetic construct
  source 1..110: mol_type = other RNA
tagaggaagtgaaacagaaggtgttgagaatcgaaagattcttaataaggcatccttccgatgctgacttctcaccgtccgttttccaataggagcgggcggtatgtttt

SEQ ID NO: 1903 - RNA, 110 nt, synthetic construct
  source 1..110: mol_type = other RNA
acgaattccagaagaaatggaagttgagaatcgaaagattcttaataaggcatccttccgatgctgacttctcaccgtccgttttccaataggagcgggcggtatgtttt

SEQ ID NO: 1904 - RNA, 110 nt, synthetic construct
  source 1..110: mol_type = other RNA
ccagaagaaatggaaagaggatgttgagaatcgaaagattcttaataaggcatccttccgatgctgacttctcaccgtccgttttccaataggagcgggcggtatgtttt

SEQ ID NO: 1905 - RNA, 110 nt, synthetic construct
  source 1..110: mol_type = other RNA
agaagaaatggaaagaggatgtgttgagaatcgaaagattcttaataaggcatccttccgatgctgacttctcaccgtccgttttccaataggagcgggcggtatgtttt

SEQ ID NO: 1906 - RNA, 110 nt, synthetic construct
  source 1..110: mol_type = other RNA
tgtggagctctaccgccagaaggttgagaatcgaaagattcttaataaggcatccttccgatgctgacttctcaccgtccgttttccaataggagcgggcggtatgtttt

SEQ ID NO: 1907 - RNA, 110 nt, synthetic construct
  source 1..110: mol_type = other RNA
taccgccagaaggtggcgcctcgttgagaatcgaaagattcttaataaggcatccttccgatgctgacttctcaccgtccgttttccaataggagcgggcggtatgtttt

SEQ ID NO: 1908 - RNA, 110 nt, synthetic construct
  source 1..110: mol_type = other RNA
cgcctctgggcgccgagctgcagttgagaatcgaaagattcttaataaggcatccttccgatgctgacttctcaccgtccgttttccaataggagcgggcggtatgtttt

SEQ ID NO: 1909 - RNA, 110 nt, synthetic construct
  source 1..110: mol_type = other RNA
cctctgggcgccgagctgcagggttgagaatcgaaagattcttaataaggcatccttccgatgctgacttctcaccgtccgttttccaataggagcgggcggtatgtttt

SEQ ID NO: 1910 - RNA, 110 nt, synthetic construct
  source 1..110: mol_type = other RNA
ggagagcgcgcgccagaagctggttgagaatcgaaagattcttaataaggcatccttccgatgctgacttctcaccgtccgttttccaataggagcgggcggtatgtttt

SEQ ID NO: 1911 - RNA, 110 nt, synthetic construct
  source 1..110: mol_type = other RNA
cagaagctgcaggagctgcaaggttgagaatcgaaagattcttaataaggcatccttccgatgctgacttctcaccgtccgttttccaataggagcgggcggtatgtttt

SEQ ID NO: 1912 - RNA, 110 nt, synthetic construct
  source 1..110: mol_type = other RNA
agggagactgtcccctgtggctgttgagaatcgaaagattcttaataaggcatccttccgatgctgacttctcaccgtccgttttccaataggagcgggcggtatgtttt

SEQ ID NO: 1913 - RNA, 110 nt, synthetic construct
  source 1..110: mol_type = other RNA
tcgcgaccgcatgcgcacacacgttgagaatcgaaagattcttaataaggcatccttccgatgctgacttctcaccgtccgttttccaataggagcgggcggtatgtttt

SEQ ID NO: 1914 - RNA, 110 nt, synthetic construct
  source 1..110: mol_type = other RNA
cgtagactctctgcgcacacaggttgagaatcgaaagattcttaataaggcatccttccgatgctgacttctcaccgtccgttttccaataggagcgggcggtatgtttt

SEQ ID NO: 1915 - RNA, 110 nt, synthetic construct
  source 1..110: mol_type = other RNA
cgccccacagcgaacagatgcggttgagaatcgaaagattcttaataaggcatccttccgatgctgacttctcaccgtccgttttccaataggagcgggcggtatgtttt

SEQ ID NO: 1916 - RNA, 110 nt, synthetic construct
  source 1..110: mol_type = other RNA
ccccacagcgaacagatgcgcggttgagaatcgaaagattcttaataaggcatccttccgatgctgacttctcaccgtccgttttccaataggagcgggcggtatgtttt

SEQ ID NO: 1917 - RNA, 110 nt, synthetic construct
  source 1..110: mol_type = other RNA
cagcgaacagatgcgcgagagcgttgagaatcgaaagattcttaataaggcatccttccgatgctgacttctcaccgtccgttttccaataggagcgggcggtatgtttt

SEQ ID NO: 1918 - RNA, 110 nt, synthetic construct
  source 1..110: mol_type = other RNA
aacagatgcgcgagagcctggcgttgagaatcgaaagattcttaataaggcatccttccgatgctgacttctcaccgtccgttttccaataggagcgggcggtatgtttt

SEQ ID NO: 1919 - RNA, 110 nt, synthetic construct
  source 1..110: mol_type = other RNA
agagcctggcccagcgcctggcgttgagaatcgaaagattcttaataaggcatccttccgatgctgacttctcaccgtccgttttccaataggagcgggcggtatgtttt

SEQ ID NO: 1920 - RNA, 110 nt, synthetic construct
  source 1..110: mol_type = other RNA
tggcccagcgcctggctgagctgttgagaatcgaaagattcttaataaggcatccttccgatgctgacttctcaccgtccgttttccaataggagcgggcggtatgtttt

SEQ ID NO: 1921 - RNA, 110 nt, synthetic construct
  source 1..110: mol_type = other RNA
tcaagagcaaccctaccttgaagttgagaatcgaaagattcttaataaggcatccttccgatgctgacttctcaccgtccgttttccaataggagcgggcggtatgtttt

SEQ ID NO: 1922 - RNA, 110 nt, synthetic construct
  source 1..110: mol_type = other RNA
cctaccttgaacgagtaccacagttgagaatcgaaagattcttaataaggcatccttccgatgctgacttctcaccgtccgttttccaataggagcgggcggtatgtttt

SEQ ID NO: 1923 - RNA, 110 nt, synthetic construct
  source 1..110: mol_type = other RNA
ctaccttgaacgagtaccacacgttgagaatcgaaagattcttaataaggcatccttccgatgctgacttctcaccgtccgttttccaataggagcgggcggtatgtttt

SEQ ID NO: 1924 - RNA, 110 nt, synthetic construct
  source 1..110: mol_type = other RNA
ctgaagacacttggcgagaaaggttgagaatcgaaagattcttaataaggcatccttccgatgctgacttctcaccgtccgttttccaataggagcgggcggtatgtttt

SEQ ID NO: 1925 - RNA, 110 nt, synthetic construct
  source 1..110: mol_type = other RNA
gcgagaaagccagacctgcgctgttgagaatcgaaagattcttaataaggcatccttccgatgctgacttctcaccgtccgttttccaataggagcgggcggtatgtttt

SEQ ID NO: 1926 - RNA, 110 nt, synthetic construct
  source 1..110: mol_type = other RNA
cgagaaagccagacctgcgctggttgagaatcgaaagattcttaataaggcatccttccgatgctgacttctcaccgtccgttttccaataggagcgggcggtatgtttt

SEQ ID NO: 1927 - RNA, 110 nt, synthetic construct
  source 1..110: mol_type = other RNA
cctgcgctggaggacctgcgccgttgagaatcgaaagattcttaataaggcatccttccgatgctgacttctcaccgtccgttttccaataggagcgggcggtatgtttt

SEQ ID NO: 1928 - RNA, 110 nt, synthetic construct
  source 1..110: mol_type = other RNA
tgatgcccatgctggagacgctgttgagaatcgaaagattcttaataaggcatccttccgatgctgacttctcaccgtccgttttccaataggagcgggcggtatgtttt

SEQ ID NO: 1929 - RNA, 110 nt, synthetic construct
  source 1..110: mol_type = other RNA
catgctggagacgcttaagaccgttgagaatcgaaagattcttaataaggcatccttccgatgctgacttctcaccgtccgttttccaataggagcgggcggtatgtttt

SEQ ID NO: 1930 - RNA, 110 nt, synthetic construct
  source 1..110: mol_type = other RNA
tggagacgcttaagacccaagtgttgagaatcgaaagattcttaataaggcatccttccgatgctgacttctcaccgtccgttttccaataggagcgggcggtatgtttt

SEQ ID NO: 1931 - RNA, 110 nt, synthetic construct
  source 1..110: mol_type = other RNA
gagacgcttaagacccaagtccgttgagaatcgaaagattcttaataaggcatccttccgatgctgacttctcaccgtccgttttccaataggagcgggcggtatgtttt

SEQ ID NO: 1932 - RNA, 110 nt, synthetic construct
  source 1..110: mol_type = other RNA
cccaagtccagagtgtgatcgagttgagaatcgaaagattcttaataaggcatccttccgatgctgacttctcaccgtccgttttccaataggagcgggcggtatgtttt

SEQ ID NO: 1933 - RNA, 110 nt, synthetic construct
  source 1..110: mol_type = other RNA
agagtgtgatcgacaaggccaggttgagaatcgaaagattcttaataaggcatccttccgatgctgacttctcaccgtccgttttccaataggagcgggcggtatgtttt

SEQ ID NO: 1934 - RNA, 110 nt, synthetic construct
  source 1..110: mol_type = other RNA
agcgagactctgactgcccagtgttgagaatcgaaagattcttaataaggcatccttccgatgctgacttctcaccgtccgttttccaataggagcgggcggtatgtttt

SEQ ID NO: 1935 - RNA, 110 nt, synthetic construct
  source 1..110: mol_type = other RNA
aagcgggcacctcactgggcaggttgagaatcgaaagattcttaataaggcatccttccgatgctgacttctcaccgtccgttttccaataggagcgggcggtatgtttt

SEQ ID NO: 1936 - RNA, 110 nt, synthetic construct
  source 1..110: mol_type = other RNA
gcgggcacctcactgggcagtcgttgagaatcgaaagattcttaataaggcatccttccgatgctgacttctcaccgtccgttttccaataggagcgggcggtatgtttt

SEQ ID NO: 1937 - RNA, 110 nt, synthetic construct
  source 1..110: mol_type = other RNA
tcactgggcagtcagagtctcggttgagaatcgaaagattcttaataaggcatccttccgatgctgacttctcaccgtccgttttccaataggagcgggcggtatgtttt

SEQ ID NO: 1938 - RNA, 110 nt, synthetic construct
  source 1..110: mol_type = other RNA
cgctggccttgtcgatcacactgttgagaatcgaaagattcttaataaggcatccttccgatgctgacttctcaccgtccgttttccaataggagcgggcggtatgtttt

SEQ ID NO: 1939 - RNA, 110 nt, synthetic construct
  source 1..110: mol_type = other RNA
ccttgtcgatcacactctggacgttgagaatcgaaagattcttaataaggcatccttccgatgctgacttctcaccgtccgttttccaataggagcgggcggtatgtttt

SEQ ID NO: 1940 - RNA, 110 nt, synthetic construct
  source 1..110: mol_type = other RNA
cttgtcgatcacactctggactgttgagaatcgaaagattcttaataaggcatccttccgatgctgacttctcaccgtccgttttccaataggagcgggcggtatgtttt

SEQ ID NO: 1941 - RNA, 110 nt, synthetic construct
  source 1..110: mol_type = other RNA
atcacactctggacttgggtctgttgagaatcgaaagattcttaataaggcatccttccgatgctgacttctcaccgtccgttttccaataggagcgggcggtatgtttt

SEQ ID NO: 1942 - RNA, 110 nt, synthetic construct
  source 1..110: mol_type = other RNA
tggacttgggtcttaagcgtctgttgagaatcgaaagattcttaataaggcatccttccgatgctgacttctcaccgtccgttttccaataggagcgggcggtatgtttt

SEQ ID NO: 1943 - RNA, 110 nt, synthetic construct
  source 1..110: mol_type = other RNA
tgggtcttaagcgtctccagcagttgagaatcgaaagattcttaataaggcatccttccgatgctgacttctcaccgtccgttttccaataggagcgggcggtatgtttt

SEQ ID NO: 1944 - RNA, 110 nt, synthetic construct
  source 1..110: mol_type = other RNA
ttaagcgtctccagcatgggcagttgagaatcgaaagattcttaataaggcatccttccgatgctgacttctcaccgtccgttttccaataggagcgggcggtatgtttt

SEQ ID NO: 1945 - RNA, 110 nt, synthetic construct
  source 1..110: mol_type = other RNA
tctccagcatgggcatcagactgttgagaatcgaaagattcttaataaggcatccttccgatgctgacttctcaccgtccgttttccaataggagcgggcggtatgtttt

SEQ ID NO: 1946 - RNA, 110 nt, synthetic construct
  source 1..110: mol_type = other RNA
agcatgggcatcagactatggcgttgagaatcgaaagattcttaataaggcatccttccgatgctgacttctcaccgtccgttttccaataggagcgggcggtatgtttt

SEQ ID NO: 1947 - RNA, 110 nt, synthetic construct
  source 1..110: mol_type = other RNA
gcatgggcatcagactatggcggttgagaatcgaaagattcttaataaggcatccttccgatgctgacttctcaccgtccgttttccaataggagcgggcggtatgtttt

SEQ ID NO: 1948 - RNA, 110 nt, synthetic construct
  source 1..110: mol_type = other RNA
atcagactatggcgcaggtcctgttgagaatcgaaagattcttaataaggcatccttccgatgctgacttctcaccgtccgttttccaataggagcgggcggtatgtttt

SEQ ID NO: 1949 - RNA, 110 nt, synthetic construct
  source 1..110: mol_type = other RNA
actatggcgcaggtcctccagcgttgagaatcgaaagattcttaataaggcatccttccgatgctgacttctcaccgtccgttttccaataggagcgggcggtatgtttt

SEQ ID NO: 1950 - RNA, 110 nt, synthetic construct
  source 1..110: mol_type = other RNA
ctatggcgcaggtcctccagcggttgagaatcgaaagattcttaataaggcatccttccgatgctgacttctcaccgtccgttttccaataggagcgggcggtatgtttt

SEQ ID NO: 1951 - RNA, 110 nt, synthetic construct
  source 1..110: mol_type = other RNA
gcgcaggtcctccagcgcaggtgttgagaatcgaaagattcttaataaggcatccttccgatgctgacttctcaccgtccgttttccaataggagcgggcggtatgtttt

SEQ ID NO: 1952 - RNA, 110 nt, synthetic construct
  source 1..110: mol_type = other RNA
agcgcaggtctggctttctcgcgttgagaatcgaaagattcttaataaggcatccttccgatgctgacttctcaccgtccgttttccaataggagcgggcggtatgtttt

SEQ ID NO: 1953 - RNA, 110 nt, synthetic construct
  source 1..110: mol_type = other RNA
ctttctcgccaagtgtcttcaggttgagaatcgaaagattcttaataaggcatccttccgatgctgacttctcaccgtccgttttccaataggagcgggcggtatgtttt

SEQ ID NO: 1954 - RNA, 110 nt, synthetic construct
  source 1..110: mol_type = other RNA
tttctcgccaagtgtcttcagggttgagaatcgaaagattcttaataaggcatccttccgatgctgacttctcaccgtccgttttccaataggagcgggcggtatgtttt

SEQ ID NO: 1955 - RNA, 110 nt, synthetic construct
  source 1..110: mol_type = other RNA
gccaagtgtcttcaggtgggttgttgagaatcgaaagattcttaataaggcatccttccgatgctgacttctcaccgtccgttttccaataggagcgggcggtatgtttt

SEQ ID NO: 1956 - RNA, 110 nt, synthetic construct
  source 1..110: mol_type = other RNA
tgtcttcaggtgggttttggccgttgagaatcgaaagattcttaataaggcatccttccgatgctgacttctcaccgtccgttttccaataggagcgggcggtatgtttt

SEQ ID NO: 1957 - RNA, 110 nt, synthetic construct
  source 1..110: mol_type = other RNA
tcaggtgggttttggccctggtgttgagaatcgaaagattcttaataaggcatccttccgatgctgacttctcaccgtccgttttccaataggagcgggcggtatgtttt

SEQ ID NO: 1958 - RNA, 110 nt, synthetic construct
  source 1..110: mol_type = other RNA
cctggtgtggtactcgttcaaggttgagaatcgaaagattcttaataaggcatccttccgatgctgacttctcaccgtccgttttccaataggagcgggcggtatgtttt

SEQ ID NO: 1959 - RNA, 110 nt, synthetic construct
  source 1..110: mol_type = other RNA
ctggtgtggtactcgttcaagggttgagaatcgaaagattcttaataaggcatccttccgatgctgacttctcaccgtccgttttccaataggagcgggcggtatgtttt

SEQ ID NO: 1960 - RNA, 110 nt, synthetic construct
  source 1..110: mol_type = other RNA
tcgttcaaggtagggttgctctgttgagaatcgaaagattcttaataaggcatccttccgatgctgacttctcaccgtccgttttccaataggagcgggcggtatgtttt

SEQ ID NO: 1961 - RNA, 110 nt, synthetic construct
  source 1..110: mol_type = other RNA
tagggttgctcttgagctcagcgttgagaatcgaaagattcttaataaggcatccttccgatgctgacttctcaccgtccgttttccaataggagcgggcggtatgtttt

SEQ ID NO: 1962 - DNA, 22 bp, Mus musculus
  source 1..22: mol_type = genomic DNA
tctcccctccatccccagggag

SEQ ID NO: 1963 - DNA, 22 bp, Mus musculus
  source 1..22: mol_type = genomic DNA
ctcccctccatccccagggagc

SEQ ID NO: 1964 - DNA, 22 bp, Mus musculus
  source 1..22: mol_type = genomic DNA
ctccatccccagggagccaggc

SEQ ID NO: 1965 - DNA, 22 bp, Mus musculus
  source 1..22: mol_type = genomic DNA
acgtatggcagcaagatgaacc

SEQ ID NO: 1966 - DNA, 22 bp, Mus musculus
  source 1..22: mol_type = genomic DNA
agcaagatgaaccccagtccca

SEQ ID NO: 1967 - DNA, 22 bp, Mus musculus
  source 1..22: mol_type = genomic DNA
cccagtcccaatgggacaaagt

SEQ ID NO: 1968 - DNA, 22 bp, Mus musculus
  source 1..22: mol_type = genomic DNA
ccagtcccaatgggacaaagtg

SEQ ID NO: 1969 - DNA, 22 bp, Mus musculus
  source 1..22: mol_type = genomic DNA
ggatgcggtcaaagacagcggc

SEQ ID NO: 1970 - DNA, 22 bp, Mus musculus
  source 1..22: mol_type = genomic DNA
acagcggcagagactatgtgtc

SEQ ID NO: 1971 - DNA, 22 bp, Mus musculus
  source 1..22: mol_type = genomic DNA
gtcccagtttgaatcctcctcc

SEQ ID NO: 1972 - DNA, 22 bp, Mus musculus
  source 1..22: mol_type = genomic DNA
aggtctttccttacttcagctg

SEQ ID NO: 1973 - DNA, 22 bp, Mus musculus
  source 1..22: mol_type = genomic DNA
acttcagctgttggcccaagga

SEQ ID NO: 1974 - DNA, 22 bp, Mus musculus
  source 1..22: mol_type = genomic DNA
cttcagctgttggcccaaggag

SEQ ID NO: 1975 - DNA, 22 bp, Mus musculus
  source 1..22: mol_type = genomic DNA
ggcccaaggaggaggattcaaa

SEQ ID NO: 1976 - DNA, 22 bp, Mus musculus
  source 1..22: mol_type = genomic DNA
aggaggattcaaactgggacac

SEQ ID NO: 1977 - DNA, 22 bp, Mus musculus
  source 1..22: mol_type = genomic DNA
cgaaatccttcactttgtccca

SEQ ID NO: 1978 - DNA, 22 bp, Mus musculus
  source 1..22: mol_type = genomic DNA
gaaatccttcactttgtcccat

SEQ ID NO: 1979 - DNA, 22 bp, Mus musculus
  source 1..22: mol_type = genomic DNA
ccttcactttgtcccattggga

SEQ ID NO: 1980 - DNA, 22 bp, Mus musculus
  source 1..22: mol_type = genomic DNA
cttcactttgtcccattgggac

SEQ ID NO: 1981 - DNA, 22 bp, Mus musculus
  source 1..22: mol_type = genomic DNA
ttcactttgtcccattgggact

SEQ ID NO: 1982 - DNA, 22 bp, Mus musculus
  source 1..22: mol_type = genomic DNA
ttcatcttgctgccatacgtgc

SEQ ID NO: 1983 - DNA, 22 bp, Mus musculus
  source 1..22: mol_type = genomic DNA
cttgctgccatacgtgccaagc

SEQ ID NO: 1984 - DNA, 22 bp, Mus musculus
  source 1..22: mol_type = genomic DNA
atacgtgccaagcctggctccc

SEQ ID NO: 1985 - DNA, 22 bp, Mus musculus
  source 1..22: mol_type = genomic DNA
ctagcctgaatctcctggaaaa

SEQ ID NO: 1986 - DNA, 22 bp, Mus musculus
  source 1..22: mol_type = genomic DNA
tctcctggaaaactgggacact

SEQ ID NO: 1987 - DNA, 22 bp, Mus musculus
  source 1..22: mol_type = genomic DNA
ctcctggaaaactgggacactc

SEQ ID NO: 1988 - DNA, 22 bp, Mus musculus
  source 1..22: mol_type = genomic DNA
gggttcaaccgttagtcagctg

SEQ ID NO: 1989 - DNA, 22 bp, Mus musculus
  source 1..22: mol_type = genomic DNA
cgttagtcagctgcaggaacgg

SEQ ID NO: 1990 - DNA, 22 bp, Mus musculus
  source 1..22: mol_type = genomic DNA
gttagtcagctgcaggaacggc

SEQ ID NO: 1991 - DNA, 22 bp, Mus musculus
  source 1..22: mol_type = genomic DNA
aggaacggctgggcccattgac

SEQ ID NO: 1992 - DNA, 22 bp, Mus musculus
  source 1..22: mol_type = genomic DNA
ggaacggctgggcccattgact

SEQ ID NO: 1993 - DNA, 22 bp, Mus musculus
  source 1..22: mol_type = genomic DNA
tgggcccattgactcgggactt

SEQ ID NO: 1994 - DNA, 22 bp, Mus musculus
  source 1..22: mol_type = genomic DNA
ctgggataacctggagaaagaa

SEQ ID NO: 1995 - DNA, 22 bp, Mus musculus
  source 1..22: mol_type = genomic DNA
attgggtgagacaggagatgaa

SEQ ID NO: 1996 - DNA, 22 bp, Mus musculus
  source 1..22: mol_type = genomic DNA
ttgggtgagacaggagatgaac

SEQ ID NO: 1997 - DNA, 22 bp, Mus musculus
  source 1..22: mol_type = genomic DNA
ggacctagaggaagtgaaacag

SEQ ID NO: 1998 - DNA, 22 bp, Mus musculus
  source 1..22: mol_type = genomic DNA
tagaggaagtgaaacagaaggt

SEQ ID NO: 1999 - DNA, 22 bp, Mus musculus
  source 1..22: mol_type = genomic DNA
acgaattccagaagaaatggaa

SEQ ID NO: 2000 - DNA, 22 bp, Mus musculus
  source 1..22: mol_type = genomic DNA
ccagaagaaatggaaagaggat

SEQ ID NO: 2001 - DNA, 22 bp, Mus musculus
  source 1..22: mol_type = genomic DNA
agaagaaatggaaagaggatgt

SEQ ID NO: 2002 - DNA, 22 bp, Mus musculus
  source 1..22: mol_type = genomic DNA
tgtggagctctaccgccagaag

SEQ ID NO: 2003 - DNA, 22 bp, Mus musculus
  source 1..22: mol_type = genomic DNA
taccgccagaaggtggcgcctc

SEQ ID NO: 2004 - DNA, 22 bp, Mus musculus
  source 1..22: mol_type = genomic DNA
cgcctctgggcgccgagctgca

SEQ ID NO: 2005 - DNA, 22 bp, Mus musculus
  source 1..22: mol_type = genomic DNA
cctctgggcgccgagctgcagg

SEQ ID NO: 2006 - DNA, 22 bp, Mus musculus
  source 1..22: mol_type = genomic DNA
ggagagcgcgcgccagaagctg

SEQ ID NO: 2007 - DNA, 22 bp, Mus musculus
  source 1..22: mol_type = genomic DNA
cagaagctgcaggagctgcaag

SEQ ID NO: 2008 - DNA, 22 bp, Mus musculus
  source 1..22: mol_type = genomic DNA
agggagactgtcccctgtggct

SEQ ID NO: 2009 - DNA, 22 bp, Mus musculus
  source 1..22: mol_type = genomic DNA
tcgcgaccgcatgcgcacacac

SEQ ID NO: 2010 - DNA, 22 bp, Mus musculus
  source 1..22: mol_type = genomic DNA
cgtagactctctgcgcacacag

SEQ ID NO: 2011 - DNA, 22 bp, Mus musculus
  source 1..22: mol_type = genomic DNA
cgccccacagcgaacagatgcg

SEQ ID NO: 2012 - DNA, 22 bp, Mus musculus
  source 1..22: mol_type = genomic DNA
ccccacagcgaacagatgcgcg

SEQ ID NO: 2013 - DNA, 22 bp, Mus musculus
  source 1..22: mol_type = genomic DNA
cagcgaacagatgcgcgagagc

SEQ ID NO: 2014 - DNA, 22 bp, Mus musculus
  source 1..22: mol_type = genomic DNA
aacagatgcgcgagagcctggc

SEQ ID NO: 2015 - DNA, 22 bp, Mus musculus
  source 1..22: mol_type = genomic DNA
agagcctggcccagcgcctggc

SEQ ID NO: 2016 - DNA, 22 bp, Mus musculus
  source 1..22: mol_type = genomic DNA
tggcccagcgcctggctgagct

SEQ ID NO: 2017 - DNA, 22 bp, Mus musculus
  source 1..22: mol_type = genomic DNA
tcaagagcaaccctaccttgaa

SEQ ID NO: 2018 - DNA, 22 bp, Mus musculus
  source 1..22: mol_type = genomic DNA
cctaccttgaacgagtaccaca

SEQ ID NO: 2019 - DNA, 22 bp, Mus musculus
  source 1..22: mol_type = genomic DNA
ctaccttgaacgagtaccacac

SEQ ID NO: 2020 - DNA, 22 bp, Mus musculus
  source 1..22: mol_type = genomic DNA
ctgaagacacttggcgagaaag

SEQ ID NO: 2021 - DNA, 22 bp, Mus musculus
  source 1..22: mol_type = genomic DNA
gcgagaaagccagacctgcgct

SEQ ID NO: 2022 - DNA, 22 bp, Mus musculus
  source 1..22: mol_type = genomic DNA
cgagaaagccagacctgcgctg

SEQ ID NO: 2023 - DNA, 22 bp, Mus musculus
  source 1..22: mol_type = genomic DNA
cctgcgctggaggacctgcgcc

SEQ ID NO: 2024 - DNA, 22 bp, Mus musculus
  source 1..22: mol_type = genomic DNA
tgatgcccatgctggagacgct

SEQ ID NO: 2025 - DNA, 22 bp, Mus musculus
  source 1..22: mol_type = genomic DNA
catgctggagacgcttaagacc

SEQ ID NO: 2026 - DNA, 22 bp, Mus musculus
  source 1..22: mol_type = genomic DNA
tggagacgcttaagacccaagt

SEQ ID NO: 2027 - DNA, 22 bp, Mus musculus
  source 1..22: mol_type = genomic DNA
gagacgcttaagacccaagtcc

SEQ ID NO: 2028 - DNA, 22 bp, Mus musculus
  source 1..22: mol_type = genomic DNA
cccaagtccagagtgtgatcga

SEQ ID NO: 2029 - DNA, 22 bp, Mus musculus
  source 1..22: mol_type = genomic DNA
agagtgtgatcgacaaggccag

SEQ ID NO: 2030 - DNA, 22 bp, Mus musculus
  source 1..22: mol_type = genomic DNA
agcgagactctgactgcccagt

SEQ ID NO: 2031 - DNA, 22 bp, Mus musculus
  source 1..22: mol_type = genomic DNA
aagcgggcacctcactgggcag

SEQ ID NO: 2032 - DNA, 22 bp, Mus musculus
  source 1..22: mol_type = genomic DNA
gcgggcacctcactgggcagtc

SEQ ID NO: 2033 - DNA, 22 bp, Mus musculus
  source 1..22: mol_type = genomic DNA
tcactgggcagtcagagtctcg

SEQ ID NO: 2034 - DNA, 22 bp, Mus musculus
  source 1..22: mol_type = genomic DNA
cgctggccttgtcgatcacact

SEQ ID NO: 2035 - DNA, 22 bp, Mus musculus
  source 1..22: mol_type = genomic DNA
ccttgtcgatcacactctggac

SEQ ID NO: 2036 - DNA, 22 bp, Mus musculus
  source 1..22: mol_type = genomic DNA
cttgtcgatcacactctggact

SEQ ID NO: 2037 - DNA, 22 bp, Mus musculus
  source 1..22: mol_type = genomic DNA
atcacactctggacttgggtct

SEQ ID NO: 2038 - DNA, 22 bp, Mus musculus
  source 1..22: mol_type = genomic DNA
tggacttgggtcttaagcgtct

SEQ ID NO: 2039 - DNA, 22 bp, Mus musculus
  source 1..22: mol_type = genomic DNA
tgggtcttaagcgtctccagca

SEQ ID NO: 2040 - DNA, 22 bp, Mus musculus
  source 1..22: mol_type = genomic DNA
ttaagcgtctccagcatgggca

SEQ ID NO: 2041 - DNA, 22 bp, Mus musculus
  source 1..22: mol_type = genomic DNA
tctccagcatgggcatcagact

SEQ ID NO: 2042 - DNA, 22 bp, Mus musculus
  source 1..22: mol_type = genomic DNA
agcatgggcatcagactatggc

SEQ ID NO: 2043 - DNA, 22 bp, Mus musculus
  source 1..22: mol_type = genomic DNA
gcatgggcatcagactatggcg

SEQ ID NO: 2044 - DNA, 22 bp, Mus musculus
  source 1..22: mol_type = genomic DNA
atcagactatggcgcaggtcct

SEQ ID NO: 2045 - DNA, 22 bp, Mus musculus
  source 1..22: mol_type = genomic DNA
actatggcgcaggtcctccagc

SEQ ID NO: 2046 - DNA, 22 bp, Mus musculus
  source 1..22: mol_type = genomic DNA
ctatggcgcaggtcctccagcg

SEQ ID NO: 2047 - DNA, 22 bp, Mus musculus
  source 1..22: mol_type = genomic DNA
gcgcaggtcctccagcgcaggt

SEQ ID NO: 2048 - DNA, 22 bp, Mus musculus
  source 1..22: mol_type = genomic DNA
agcgcaggtctggctttctcgc

SEQ ID NO: 2049 - DNA, 22 bp, Mus musculus
  source 1..22: mol_type = genomic DNA
ctttctcgccaagtgtcttcag

SEQ ID NO: 2050 - DNA, 22 bp, Mus musculus
  source 1..22: mol_type = genomic DNA
tttctcgccaagtgtcttcagg

SEQ ID NO: 2051 - DNA, 22 bp, Mus musculus
  source 1..22: mol_type = genomic DNA
gccaagtgtcttcaggtgggtt

SEQ ID NO: 2052 - DNA, 22 bp, Mus musculus
  source 1..22: mol_type = genomic DNA
tgtcttcaggtgggttttggcc

SEQ ID NO: 2053 - DNA, 22 bp, Mus musculus
  source 1..22: mol_type = genomic DNA
tcaggtgggttttggccctggt

SEQ ID NO: 2054 - DNA, 22 bp, Mus musculus
  source 1..22: mol_type = genomic DNA
cctggtgtggtactcgttcaag

SEQ ID NO: 2055 - DNA, 22 bp, Mus musculus
  source 1..22: mol_type = genomic DNA
ctggtgtggtactcgttcaagg

SEQ ID NO: 2056 - DNA, 22 bp, Mus musculus
  source 1..22: mol_type = genomic DNA
tcgttcaaggtagggttgctct

SEQ ID NO: 2057 - DNA, 22 bp, Mus musculus
  source 1..22: mol_type = genomic DNA
tagggttgctcttgagctcagc

SEQ ID NO: 2058 - RNA, 110 nt, synthetic construct
  source 1..110: mol_type = other RNA
tgctcttgagctcagccaggcggttgagaatcgaaagattcttaataaggcatccttccgatgctgacttctcaccgtccgttttccaataggagcgggcggtatgtttt

SEQ ID NO: 2059 - RNA, 110 nt, synthetic construct
  source 1..110: mol_type = other RNA
ttgagctcagccaggcgctggggttgagaatcgaaagattcttaataaggcatccttccgatgctgacttctcaccgtccgttttccaataggagcgggcggtatgtttt

SEQ ID NO: 2060 - RNA, 110 nt, synthetic construct
  source 1..110: mol_type = other RNA
tgagctcagccaggcgctgggcgttgagaatcgaaagattcttaataaggcatccttccgatgctgacttctcaccgtccgttttccaataggagcgggcggtatgtttt

SEQ ID NO: 2061 - RNA, 110 nt, synthetic construct
  source 1..110: mol_type = other RNA
ggctctcgcgcatctgttcgctgttgagaatcgaaagattcttaataaggcatccttccgatgctgacttctcaccgtccgttttccaataggagcgggcggtatgtttt

SEQ ID NO: 2062 - RNA, 110 nt, synthetic construct
  source 1..110: mol_type = other RNA
ctctcgcgcatctgttcgctgtgttgagaatcgaaagattcttaataaggcatccttccgatgctgacttctcaccgtccgttttccaataggagcgggcggtatgtttt

SEQ ID NO: 2063 - RNA, 110 nt, synthetic construct
  source 1..110: mol_type = other RNA
gtggggcgctagctgtgtgcgcgttgagaatcgaaagattcttaataaggcatccttccgatgctgacttctcaccgtccgttttccaataggagcgggcggtatgtttt

SEQ ID NO: 2064 - RNA, 110 nt, synthetic construct
  source 1..110: mol_type = other RNA
ggggcgctagctgtgtgcgcaggttgagaatcgaaagattcttaataaggcatccttccgatgctgacttctcaccgtccgttttccaataggagcgggcggtatgtttt

SEQ ID NO: 2065 - RNA, 110 nt, synthetic construct
  source 1..110: mol_type = other RNA
ggtcgcgaaattcctcagccacgttgagaatcgaaagattcttaataaggcatccttccgatgctgacttctcaccgtccgttttccaataggagcgggcggtatgtttt

SEQ ID NO: 2066 - RNA, 110 nt, synthetic construct
  source 1..110: mol_type = other RNA
cgaaattcctcagccacagggggttgagaatcgaaagattcttaataaggcatccttccgatgctgacttctcaccgtccgttttccaataggagcgggcggtatgtttt

SEQ ID NO: 2067 - RNA, 110 nt, synthetic construct
  source 1..110: mol_type = other RNA
gccacaggggacagtctcccttgttgagaatcgaaagattcttaataaggcatccttccgatgctgacttctcaccgtccgttttccaataggagcgggcggtatgtttt

SEQ ID NO: 2068 - RNA, 110 nt, synthetic construct
  source 1..110: mol_type = other RNA
gacagtctcccttgcagctcctgttgagaatcgaaagattcttaataaggcatccttccgatgctgacttctcaccgtccgttttccaataggagcgggcggtatgtttt

SEQ ID NO: 2069 - RNA, 110 nt, synthetic construct
  source 1..110: mol_type = other RNA
tcccttgcagctcctgcagcttgttgagaatcgaaagattcttaataaggcatccttccgatgctgacttctcaccgtccgttttccaataggagcgggcggtatgtttt

SEQ ID NO: 2070 - RNA, 110 nt, synthetic construct
  source 1..110: mol_type = other RNA
agcttctggcgcgcgctctcctgttgagaatcgaaagattcttaataaggcatccttccgatgctgacttctcaccgtccgttttccaataggagcgggcggtatgtttt

SEQ ID NO: 2071 - RNA, 110 nt, synthetic construct
  source 1..110: mol_type = other RNA
ctggcgcgcgctctcctgcagcgttgagaatcgaaagattcttaataaggcatccttccgatgctgacttctcaccgtccgttttccaataggagcgggcggtatgtttt

SEQ ID NO: 2072 - RNA, 110 nt, synthetic construct
  source 1..110: mol_type = other RNA
ctctcctgcagctcggcgcccagttgagaatcgaaagattcttaataaggcatccttccgatgctgacttctcaccgtccgttttccaataggagcgggcggtatgtttt

SEQ ID NO: 2073 - RNA, 110 nt, synthetic construct
  source 1..110: mol_type = other RNA
ccagaggcgccaccttctggcggttgagaatcgaaagattcttaataaggcatccttccgatgctgacttctcaccgtccgttttccaataggagcgggcggtatgtttt

SEQ ID NO: 2074 - RNA, 110 nt, synthetic construct
  source 1..110: mol_type = other RNA
agaggcgccaccttctggcggtgttgagaatcgaaagattcttaataaggcatccttccgatgctgacttctcaccgtccgttttccaataggagcgggcggtatgtttt

SEQ ID NO: 2075 - RNA, 110 nt, synthetic construct
  source 1..110: mol_type = other RNA
ccacatcctctttccatttcttgttgagaatcgaaagattcttaataaggcatccttccgatgctgacttctcaccgtccgttttccaataggagcgggcggtatgtttt

SEQ ID NO: 2076 - RNA, 110 nt, synthetic construct
  source 1..110: mol_type = other RNA
atttcttctggaattcgtccaggttgagaatcgaaagattcttaataaggcatccttccgatgctgacttctcaccgtccgttttccaataggagcgggcggtatgtttt

SEQ ID NO: 2077 - RNA, 110 nt, synthetic construct
  source 1..110: mol_type = other RNA
tttcttctggaattcgtccagggttgagaatcgaaagattcttaataaggcatccttccgatgctgacttctcaccgtccgttttccaataggagcgggcggtatgtttt

SEQ ID NO: 2078 - RNA, 110 nt, synthetic construct
  source 1..110: mol_type = other RNA
tgcaccttctgtttcacttcctgttgagaatcgaaagattcttaataaggcatccttccgatgctgacttctcaccgtccgttttccaataggagcgggcggtatgtttt

SEQ ID NO: 2079 - RNA, 110 nt, synthetic construct
  source 1..110: mol_type = other RNA
gcaccttctgtttcacttcctcgttgagaatcgaaagattcttaataaggcatccttccgatgctgacttctcaccgtccgttttccaataggagcgggcggtatgtttt

SEQ ID NO: 2080 - RNA, 110 nt, synthetic construct
  source 1..110: mol_type = other RNA
ctcacccaatctgtttctttctgttgagaatcgaaagattcttaataaggcatccttccgatgctgacttctcaccgtccgttttccaataggagcgggcggtatgtttt

SEQ ID NO: 2081 - RNA, 110 nt, synthetic construct
  source 1..110: mol_type = other RNA
tttctttctccaggttatcccagttgagaatcgaaagattcttaataaggcatccttccgatgctgacttctcaccgtccgttttccaataggagcgggcggtatgtttt

SEQ ID NO: 2082 - RNA, 110 nt, synthetic construct
  source 1..110: mol_type = other RNA
ttatcccagaagtcccgagtcagttgagaatcgaaagattcttaataaggcatccttccgatgctgacttctcaccgtccgttttccaataggagcgggcggtatgtttt

SEQ ID NO: 2083 - RNA, 110 nt, synthetic construct
  source 1..110: mol_type = other RNA
tatcccagaagtcccgagtcaagttgagaatcgaaagattcttaataaggcatccttccgatgctgacttctcaccgtccgttttccaataggagcgggcggtatgtttt

SEQ ID NO: 2084 - RNA, 110 nt, synthetic construct
  source 1..110: mol_type = other RNA
tgcagctgactaacggttgaacgttgagaatcgaaagattcttaataaggcatccttccgatgctgacttctcaccgtccgttttccaataggagcgggcggtatgtttt

SEQ ID NO: 2085 - RNA, 110 nt, synthetic construct
  source 1..110: mol_type = other RNA
cagctgactaacggttgaacccgttgagaatcgaaagattcttaataaggcatccttccgatgctgacttctcaccgtccgttttccaataggagcgggcggtatgtttt

SEQ ID NO: 2086 - RNA, 110 nt, synthetic construct
  source 1..110: mol_type = other RNA
taacggttgaacccagagtgtcgttgagaatcgaaagattcttaataaggcatccttccgatgctgacttctcaccgtccgttttccaataggagcgggcggtatgtttt

SEQ ID NO: 2087 - RNA, 110 nt, synthetic construct
  source 1..110: mol_type = other RNA
cccagagtgtcccagttttccagttgagaatcgaaagattcttaataaggcatccttccgatgctgacttctcaccgtccgttttccaataggagcgggcggtatgtttt

SEQ ID NO: 2088 - RNA, 110 nt, synthetic construct
  source 1..110: mol_type = other RNA
gtgtcccagttttccaggagatgttgagaatcgaaagattcttaataaggcatccttccgatgctgacttctcaccgtccgttttccaataggagcgggcggtatgtttt

SEQ ID NO: 2089 - DNA, 22 bp, Mus musculus
  source 1..22: mol_type = genomic DNA
tgctcttgagctcagccaggcg

SEQ ID NO: 2090 - DNA, 22 bp, Mus musculus
  source 1..22: mol_type = genomic DNA
ttgagctcagccaggcgctggg

SEQ ID NO: 2091 - DNA, 22 bp, Mus musculus
  source 1..22: mol_type = genomic DNA
tgagctcagccaggcgctgggc

SEQ ID NO: 2092 - DNA, 22 bp, Mus musculus
  source 1..22: mol_type = genomic DNA
ggctctcgcgcatctgttcgct

SEQ ID NO: 2093 - DNA, 22 bp, Mus musculus
  source 1..22: mol_type = genomic DNA
ctctcgcgcatctgttcgctgt

SEQ ID NO: 2094 - DNA, 22 bp, Mus musculus
  source 1..22: mol_type = genomic DNA
gtggggcgctagctgtgtgcgc

SEQ ID NO: 2095 - DNA, 22 bp, Mus musculus
  source 1..22: mol_type = genomic DNA
ggggcgctagctgtgtgcgcag

SEQ ID NO: 2096 - DNA, 22 bp, Mus musculus
  source 1..22: mol_type = genomic DNA
ggtcgcgaaattcctcagccac

SEQ ID NO: 2097 - DNA, 22 bp, Mus musculus
  source 1..22: mol_type = genomic DNA
cgaaattcctcagccacagggg

SEQ ID NO: 2098 - DNA, 22 bp, Mus musculus
  source 1..22: mol_type = genomic DNA
gccacaggggacagtctccctt

SEQ ID NO: 2099 - DNA, 22 bp, Mus musculus
  source 1..22: mol_type = genomic DNA
gacagtctcccttgcagctcct

SEQ ID NO: 2100 - DNA, 22 bp, Mus musculus
  source 1..22: mol_type = genomic DNA
tcccttgcagctcctgcagctt

SEQ ID NO: 2101 - DNA, 22 bp, Mus musculus
  source 1..22: mol_type = genomic DNA
agcttctggcgcgcgctctcct

SEQ ID NO: 2102 - DNA, 22 bp, Mus musculus
  source 1..22: mol_type = genomic DNA
ctggcgcgcgctctcctgcagc

SEQ ID NO: 2103 - DNA, 22 bp, Mus musculus
  source 1..22: mol_type = genomic DNA
ctctcctgcagctcggcgccca

SEQ ID NO: 2104 - DNA, 22 bp, Mus musculus
  source 1..22: mol_type = genomic DNA
ccagaggcgccaccttctggcg

SEQ ID NO: 2105 - DNA, 22 bp, Mus musculus
  source 1..22: mol_type = genomic DNA
agaggcgccaccttctggcggt

SEQ ID NO: 2106 - DNA, 22 bp, Mus musculus
  source 1..22: mol_type = genomic DNA
ccacatcctctttccatttctt

SEQ ID NO: 2107 - DNA, 22 bp, Mus musculus
  source 1..22: mol_type = genomic DNA
atttcttctggaattcgtccag

SEQ ID NO: 2108 - DNA, 22 bp, Mus musculus
  source 1..22: mol_type = genomic DNA
tttcttctggaattcgtccagg

SEQ ID NO: 2109 - DNA, 22 bp, Mus musculus
  source 1..22: mol_type = genomic DNA
tgcaccttctgtttcacttcct

SEQ ID NO: 2110 - DNA, 22 bp, Mus musculus
  source 1..22: mol_type = genomic DNA
gcaccttctgtttcacttcctc

SEQ ID NO: 2111 - DNA, 22 bp, Mus musculus
  source 1..22: mol_type = genomic DNA
ctcacccaatctgtttctttct

SEQ ID NO: 2112 - DNA, 22 bp, Mus musculus
  source 1..22: mol_type = genomic DNA
tttctttctccaggttatccca

SEQ ID NO: 2113 - DNA, 22 bp, Mus musculus
  source 1..22: mol_type = genomic DNA
ttatcccagaagtcccgagtca

SEQ ID NO: 2114 - DNA, 22 bp, Mus musculus
  source 1..22: mol_type = genomic DNA
tatcccagaagtcccgagtcaa

SEQ ID NO: 2115 - DNA, 22 bp, Mus musculus
  source 1..22: mol_type = genomic DNA
tgcagctgactaacggttgaac

SEQ ID NO: 2116 - DNA, 22 bp, Mus musculus
  source 1..22: mol_type = genomic DNA
cagctgactaacggttgaaccc

SEQ ID NO: 2117 - DNA, 22 bp, Mus musculus
  source 1..22: mol_type = genomic DNA
taacggttgaacccagagtgtc

SEQ ID NO: 2118 - DNA, 22 bp, Mus musculus
  source 1..22: mol_type = genomic DNA
cccagagtgtcccagttttcca

SEQ ID NO: 2119 - DNA, 22 bp, Mus musculus
  source 1..22: mol_type = genomic DNA
gtgtcccagttttccaggagat

SEQ ID NO: 2120 - RNA, 110 nt, synthetic construct
  source 1..110: mol_type = other RNA
gttgttcctttagtaattgcatgttgagaatcgaaagattcttaataaggcatccttccgatgctgacttctcaccgtccgttttccaataggagcgggcggtatgtttt

SEQ ID NO: 2121 - RNA, 110 nt, synthetic construct
  source 1..110: mol_type = other RNA
tcctttagtaattgcatccagagttgagaatcgaaagattcttaataaggcatccttccgatgctgacttctcaccgtccgttttccaataggagcgggcggtatgtttt

SEQ ID NO: 2122 - RNA, 110 nt, synthetic construct
  source 1..110: mol_type = other RNA
agtaattgcatccagagtggatgttgagaatcgaaagattcttaataaggcatccttccgatgctgacttctcaccgtccgttttccaataggagcgggcggtatgtttt

SEQ ID NO: 2123 - RNA, 110 nt, synthetic construct
  source 1..110: mol_type = other RNA
ttcatcatttgattctgcacctgttgagaatcgaaagattcttaataaggcatccttccgatgctgacttctcaccgtccgttttccaataggagcgggcggtatgtttt

SEQ ID NO: 2124 - RNA, 110 nt, synthetic construct
  source 1..110: mol_type = other RNA
tctgcaccttcagagccaaaatgttgagaatcgaaagattcttaataaggcatccttccgatgctgacttctcaccgtccgttttccaataggagcgggcggtatgtttt

SEQ ID NO: 2125 - RNA, 110 nt, synthetic construct
  source 1..110: mol_type = other RNA
gatgatgtcaaaattttagcgagttgagaatcgaaagattcttaataaggcatccttccgatgctgacttctcaccgtccgttttccaataggagcgggcggtatgtttt

SEQ ID NO: 2126 - RNA, 110 nt, synthetic construct
  source 1..110: mol_type = other RNA
tttagcgaatggcctcctgcaggttgagaatcgaaagattcttaataaggcatccttccgatgctgacttctcaccgtccgttttccaataggagcgggcggtatgtttt

SEQ ID NO: 2127 - RNA, 110 nt, synthetic construct
  source 1..110: mol_type = other RNA
aatggcctcctgcagctgggtcgttgagaatcgaaagattcttaataaggcatccttccgatgctgacttctcaccgtccgttttccaataggagcgggcggtatgtttt

SEQ ID NO: 2128 - RNA, 110 nt, synthetic construct
  source 1..110: mol_type = other RNA
cctgcagctgggtcatggacttgttgagaatcgaaagattcttaataaggcatccttccgatgctgacttctcaccgtccgttttccaataggagcgggcggtatgtttt

SEQ ID NO: 2129 - RNA, 110 nt, synthetic construct
  source 1..110: mol_type = other RNA
atggacttaaagattttgtccagttgagaatcgaaagattcttaataaggcatccttccgatgctgacttctcaccgtccgttttccaataggagcgggcggtatgtttt

SEQ ID NO: 2130 - RNA, 110 nt, synthetic construct
  source 1..110: mol_type = other RNA
taaagattttgtccataagactgttgagaatcgaaagattcttaataaggcatccttccgatgctgacttctcaccgtccgttttccaataggagcgggcggtatgtttt

SEQ ID NO: 2131 - RNA, 110 nt, synthetic construct
  source 1..110: mol_type = other RNA
gacaaattaacgacatatttcagttgagaatcgaaagattcttaataaggcatccttccgatgctgacttctcaccgtccgttttccaataggagcgggcggtatgtttt

SEQ ID NO: 2132 - RNA, 110 nt, synthetic construct
  source 1..110: mol_type = other RNA
ttcagaagctcaacatatttgagttgagaatcgaaagattcttaataaggcatccttccgatgctgacttctcaccgtccgttttccaataggagcgggcggtatgtttt

SEQ ID NO: 2133 - RNA, 110 nt, synthetic construct
  source 1..110: mol_type = other RNA
caatgaaatcaaagaagaggaagttgagaatcgaaagattcttaataaggcatccttccgatgctgacttctcaccgtccgttttccaataggagcgggcggtatgtttt

SEQ ID NO: 2134 - RNA, 110 nt, synthetic construct
  source 1..110: mol_type = other RNA
aaagaagaggaaaaggagctaagttgagaatcgaaagattcttaataaggcatccttccgatgctgacttctcaccgtccgttttccaataggagcgggcggtatgtttt

SEQ ID NO: 2135 - RNA, 110 nt, synthetic construct
  source 1..110: mol_type = other RNA
tacaagttaaaaacgaggaggtgttgagaatcgaaagattcttaataaggcatccttccgatgctgacttctcaccgtccgttttccaataggagcgggcggtatgtttt

SEQ ID NO: 2136 - RNA, 110 nt, synthetic construct
  source 1..110: mol_type = other RNA
cgaggaggtgaagaacatgtcagttgagaatcgaaagattcttaataaggcatccttccgatgctgacttctcaccgtccgttttccaataggagcgggcggtatgtttt

SEQ ID NO: 2137 - RNA, 110 nt, synthetic construct
  source 1..110: mol_type = other RNA
acatgtcagtagaactgaactcgttgagaatcgaaagattcttaataaggcatccttccgatgctgacttctcaccgtccgttttccaataggagcgggcggtatgtttt

SEQ ID NO: 2138 - RNA, 110 nt, synthetic construct
  source 1..110: mol_type = other RNA
cagtagaactgaactcaaagctgttgagaatcgaaagattcttaataaggcatccttccgatgctgacttctcaccgtccgttttccaataggagcgggcggtatgtttt

SEQ ID NO: 2139 - RNA, 110 nt, synthetic construct
  source 1..110: mol_type = other RNA
gtagaactgaactcaaagcttggttgagaatcgaaagattcttaataaggcatccttccgatgctgacttctcaccgtccgttttccaataggagcgggcggtatgtttt

SEQ ID NO: 2140 - RNA, 110 nt, synthetic construct
  source 1..110: mol_type = other RNA
tgagagtctgctggaagagaaggttgagaatcgaaagattcttaataaggcatccttccgatgctgacttctcaccgtccgttttccaataggagcgggcggtatgtttt

SEQ ID NO: 2141 - RNA, 110 nt, synthetic construct
  source 1..110: mol_type = other RNA
aagagaagacagcccttcaacagttgagaatcgaaagattcttaataaggcatccttccgatgctgacttctcaccgtccgttttccaataggagcgggcggtatgtttt

SEQ ID NO: 2142 - RNA, 110 nt, synthetic construct
  source 1..110: mol_type = other RNA
aagacagcccttcaacacaagggttgagaatcgaaagattcttaataaggcatccttccgatgctgacttctcaccgtccgttttccaataggagcgggcggtatgtttt

SEQ ID NO: 2143 - RNA, 110 nt, synthetic construct
  source 1..110: mol_type = other RNA
agacagcccttcaacacaaggtgttgagaatcgaaagattcttaataaggcatccttccgatgctgacttctcaccgtccgttttccaataggagcgggcggtatgtttt

SEQ ID NO: 2144 - RNA, 110 nt, synthetic construct
  source 1..110: mol_type = other RNA
gacagcccttcaacacaaggtcgttgagaatcgaaagattcttaataaggcatccttccgatgctgacttctcaccgtccgttttccaataggagcgggcggtatgtttt

SEQ ID NO: 2145 - RNA, 110 nt, synthetic construct
  source 1..110: mol_type = other RNA
tcaacacaaggtcagggctttggttgagaatcgaaagattcttaataaggcatccttccgatgctgacttctcaccgtccgttttccaataggagcgggcggtatgtttt

SEQ ID NO: 2146 - RNA, 110 nt, synthetic construct
  source 1..110: mol_type = other RNA
gagcagctaaccaacttaattcgttgagaatcgaaagattcttaataaggcatccttccgatgctgacttctcaccgtccgttttccaataggagcgggcggtatgtttt

SEQ ID NO: 2147 - RNA, 110 nt, synthetic construct
  source 1..110: mol_type = other RNA
accaacttaattctaagcccaggttgagaatcgaaagattcttaataaggcatccttccgatgctgacttctcaccgtccgttttccaataggagcgggcggtatgtttt

SEQ ID NO: 2148 - RNA, 110 nt, synthetic construct
  source 1..110: mol_type = other RNA
ccaacttaattctaagcccagcgttgagaatcgaaagattcttaataaggcatccttccgatgctgacttctcaccgtccgttttccaataggagcgggcggtatgtttt

SEQ ID NO: 2149 - RNA, 110 nt, synthetic construct
  source 1..110: mol_type = other RNA
caacttaattctaagcccagctgttgagaatcgaaagattcttaataaggcatccttccgatgctgacttctcaccgtccgttttccaataggagcgggcggtatgtttt

SEQ ID NO: 2150 - RNA, 110 nt, synthetic construct
  source 1..110: mol_type = other RNA
aattctaagcccagctggggctgttgagaatcgaaagattcttaataaggcatccttccgatgctgacttctcaccgtccgttttccaataggagcgggcggtatgtttt

SEQ ID NO: 2151 - RNA, 110 nt, synthetic construct
  source 1..110: mol_type = other RNA
ttctaagcccagctggggctcagttgagaatcgaaagattcttaataaggcatccttccgatgctgacttctcaccgtccgttttccaataggagcgggcggtatgtttt

SEQ ID NO: 2152 - RNA, 110 nt, synthetic construct
  source 1..110: mol_type = other RNA
ttactttgagtgatgttacttcgttgagaatcgaaagattcttaataaggcatccttccgatgctgacttctcaccgtccgttttccaataggagcgggcggtatgtttt

SEQ ID NO: 2153 - RNA, 110 nt, synthetic construct
  source 1..110: mol_type = other RNA
tgatgttacttctgggtgctccgttgagaatcgaaagattcttaataaggcatccttccgatgctgacttctcaccgtccgttttccaataggagcgggcggtatgtttt

SEQ ID NO: 2154 - RNA, 110 nt, synthetic construct
  source 1..110: mol_type = other RNA
tctgggtgctcctgagccccaggttgagaatcgaaagattcttaataaggcatccttccgatgctgacttctcaccgtccgttttccaataggagcgggcggtatgtttt

SEQ ID NO: 2155 - RNA, 110 nt, synthetic construct
  source 1..110: mol_type = other RNA
ctgggtgctcctgagccccagcgttgagaatcgaaagattcttaataaggcatccttccgatgctgacttctcaccgtccgttttccaataggagcgggcggtatgtttt

SEQ ID NO: 2156 - RNA, 110 nt, synthetic construct
  source 1..110: mol_type = other RNA
tgctcctgagccccagctgggcgttgagaatcgaaagattcttaataaggcatccttccgatgctgacttctcaccgtccgttttccaataggagcgggcggtatgtttt

SEQ ID NO: 2157 - RNA, 110 nt, synthetic construct
  source 1..110: mol_type = other RNA
taagttggttagctgctcctccgttgagaatcgaaagattcttaataaggcatccttccgatgctgacttctcaccgtccgttttccaataggagcgggcggtatgtttt

SEQ ID NO: 2158 - RNA, 110 nt, synthetic construct
  source 1..110: mol_type = other RNA
tccaaagccctgaccttgtgttgttgagaatcgaaagattcttaataaggcatccttccgatgctgacttctcaccgtccgttttccaataggagcgggcggtatgtttt

SEQ ID NO: 2159 - RNA, 110 nt, synthetic construct
  source 1..110: mol_type = other RNA
ccaaagccctgaccttgtgttggttgagaatcgaaagattcttaataaggcatccttccgatgctgacttctcaccgtccgttttccaataggagcgggcggtatgtttt

SEQ ID NO: 2160 - RNA, 110 nt, synthetic construct
  source 1..110: mol_type = other RNA
tgaagggctgtcttctcttccagttgagaatcgaaagattcttaataaggcatccttccgatgctgacttctcaccgtccgttttccaataggagcgggcggtatgtttt

SEQ ID NO: 2161 - RNA, 110 nt, synthetic construct
  source 1..110: mol_type = other RNA
gtcttctcttccagcagactctgttgagaatcgaaagattcttaataaggcatccttccgatgctgacttctcaccgtccgttttccaataggagcgggcggtatgtttt

SEQ ID NO: 2162 - RNA, 110 nt, synthetic construct
  source 1..110: mol_type = other RNA
cttccagcagactctcaagcttgttgagaatcgaaagattcttaataaggcatccttccgatgctgacttctcaccgtccgttttccaataggagcgggcggtatgtttt

SEQ ID NO: 2163 - RNA, 110 nt, synthetic construct
  source 1..110: mol_type = other RNA
agcagactctcaagctttgagtgttgagaatcgaaagattcttaataaggcatccttccgatgctgacttctcaccgtccgttttccaataggagcgggcggtatgtttt

SEQ ID NO: 2164 - RNA, 110 nt, synthetic construct
  source 1..110: mol_type = other RNA
ttcacctcctcgtttttaacttgttgagaatcgaaagattcttaataaggcatccttccgatgctgacttctcaccgtccgttttccaataggagcgggcggtatgtttt

SEQ ID NO: 2165 - RNA, 110 nt, synthetic construct
  source 1..110: mol_type = other RNA
gtttttaacttgtagtgtagatgttgagaatcgaaagattcttaataaggcatccttccgatgctgacttctcaccgtccgttttccaataggagcgggcggtatgtttt

SEQ ID NO: 2166 - RNA, 110 nt, synthetic construct
  source 1..110: mol_type = other RNA
tgtagtgtagatgtagttcttcgttgagaatcgaaagattcttaataaggcatccttccgatgctgacttctcaccgtccgttttccaataggagcgggcggtatgtttt

SEQ ID NO: 2167 - RNA, 110 nt, synthetic construct
  source 1..110: mol_type = other RNA
cttttcctcttctttgatttcagttgagaatcgaaagattcttaataaggcatccttccgatgctgacttctcaccgtccgttttccaataggagcgggcggtatgtttt

SEQ ID NO: 2168 - RNA, 110 nt, synthetic construct
  source 1..110: mol_type = other RNA
ttgatttcattggttcgaagtggttgagaatcgaaagattcttaataaggcatccttccgatgctgacttctcaccgtccgttttccaataggagcgggcggtatgtttt

SEQ ID NO: 2169 - RNA, 110 nt, synthetic construct
  source 1..110: mol_type = other RNA
ggttcgaagtgataggtcataagttgagaatcgaaagattcttaataaggcatccttccgatgctgacttctcaccgtccgttttccaataggagcgggcggtatgtttt

SEQ ID NO: 2170 - RNA, 110 nt, synthetic construct
  source 1..110: mol_type = other RNA
taaaaagactgatcaaatatgtgttgagaatcgaaagattcttaataaggcatccttccgatgctgacttctcaccgtccgttttccaataggagcgggcggtatgtttt

SEQ ID NO: 2171 - RNA, 110 nt, synthetic construct
  source 1..110: mol_type = other RNA
aaatatgtcgttaatttgtcccgttgagaatcgaaagattcttaataaggcatccttccgatgctgacttctcaccgtccgttttccaataggagcgggcggtatgtttt

SEQ ID NO: 2172 - RNA, 110 nt, synthetic construct
  source 1..110: mol_type = other RNA
ttagtcttatggacaaaatcttgttgagaatcgaaagattcttaataaggcatccttccgatgctgacttctcaccgtccgttttccaataggagcgggcggtatgtttt

SEQ ID NO: 2173 - RNA, 110 nt, synthetic construct
  source 1..110: mol_type = other RNA
ttaagtccatgacccagctgcagttgagaatcgaaagattcttaataaggcatccttccgatgctgacttctcaccgtccgttttccaataggagcgggcggtatgtttt

SEQ ID NO: 2174 - RNA, 110 nt, synthetic construct
  source 1..110: mol_type = other RNA
tccaacatagcaaatcttgattgttgagaatcgaaagattcttaataaggcatccttccgatgctgacttctcaccgtccgttttccaataggagcgggcggtatgtttt

SEQ ID NO: 2175 - RNA, 110 nt, synthetic construct
  source 1..110: mol_type = other RNA
gcaaatcttgattttggctctggttgagaatcgaaagattcttaataaggcatccttccgatgctgacttctcaccgtccgttttccaataggagcgggcggtatgtttt

SEQ ID NO: 2176 - RNA, 110 nt, synthetic construct
  source 1..110: mol_type = other RNA
tcttgattttggctctgaaggtgttgagaatcgaaagattcttaataaggcatccttccgatgctgacttctcaccgtccgttttccaataggagcgggcggtatgtttt

SEQ ID NO: 2177 - RNA, 110 nt, synthetic construct
  source 1..110: mol_type = other RNA
gaaggtgcagaatcaaatgatggttgagaatcgaaagattcttaataaggcatccttccgatgctgacttctcaccgtccgttttccaataggagcgggcggtatgtttt

SEQ ID NO: 2178 - RNA, 110 nt, synthetic construct
  source 1..110: mol_type = other RNA
aaggtgcagaatcaaatgatgagttgagaatcgaaagattcttaataaggcatccttccgatgctgacttctcaccgtccgttttccaataggagcgggcggtatgtttt

SEQ ID NO: 2179 - RNA, 110 nt, synthetic construct
  source 1..110: mol_type = other RNA
gcagaatcaaatgatgaaaggtgttgagaatcgaaagattcttaataaggcatccttccgatgctgacttctcaccgtccgttttccaataggagcgggcggtatgtttt

SEQ ID NO: 2180 - RNA, 110 nt, synthetic construct
  source 1..110: mol_type = other RNA
tccactctggatgcaattactagttgagaatcgaaagattcttaataaggcatccttccgatgctgacttctcaccgtccgttttccaataggagcgggcggtatgtttt

SEQ ID NO: 2181 - RNA, 110 nt, synthetic construct
  source 1..110: mol_type = other RNA
caattactaaaggaacaacaaagttgagaatcgaaagattcttaataaggcatccttccgatgctgacttctcaccgtccgttttccaataggagcgggcggtatgtttt

SEQ ID NO: 2182 - RNA, 110 nt, synthetic construct
  source 1..110: mol_type = other RNA
tacaatctgtgttcagagttttgttgagaatcgaaagattcttaataaggcatccttccgatgctgacttctcaccgtccgttttccaataggagcgggcggtatgtttt

SEQ ID NO: 2183 - RNA, 110 nt, synthetic construct
  source 1..110: mol_type = other RNA
agttttgtagaacagcaagacagttgagaatcgaaagattcttaataaggcatccttccgatgctgacttctcaccgtccgttttccaataggagcgggcggtatgtttt

SEQ ID NO: 2184 - RNA, 110 nt, synthetic construct
  source 1..110: mol_type = other RNA
agaacagcaagacaacagcatagttgagaatcgaaagattcttaataaggcatccttccgatgctgacttctcaccgtccgttttccaataggagcgggcggtatgtttt

SEQ ID NO: 2185 - RNA, 110 nt, synthetic construct
  source 1..110: mol_type = other RNA
acaacagcataagagaactcctgttgagaatcgaaagattcttaataaggcatccttccgatgctgacttctcaccgtccgttttccaataggagcgggcggtatgtttt

SEQ ID NO: 2186 - RNA, 110 nt, synthetic construct
  source 1..110: mol_type = other RNA
aacagcataagagaactcctccgttgagaatcgaaagattcttaataaggcatccttccgatgctgacttctcaccgtccgttttccaataggagcgggcggtatgtttt

SEQ ID NO: 2187 - RNA, 110 nt, synthetic construct
  source 1..110: mol_type = other RNA
aagagaactcctccagagtgtggttgagaatcgaaagattcttaataaggcatccttccgatgctgacttctcaccgtccgttttccaataggagcgggcggtatgtttt

SEQ ID NO: 2188 - RNA, 110 nt, synthetic construct
  source 1..110: mol_type = other RNA
aactcctccagagtgtggaagagttgagaatcgaaagattcttaataaggcatccttccgatgctgacttctcaccgtccgttttccaataggagcgggcggtatgtttt

SEQ ID NO: 2189 - RNA, 110 nt, synthetic construct
  source 1..110: mol_type = other RNA
aacagtataaacaattaagtcagttgagaatcgaaagattcttaataaggcatccttccgatgctgacttctcaccgtccgttttccaataggagcgggcggtatgtttt

SEQ ID NO: 2190 - RNA, 110 nt, synthetic construct
  source 1..110: mol_type = other RNA
aaagaaatagaaaagcaggtaagttgagaatcgaaagattcttaataaggcatccttccgatgctgacttctcaccgtccgttttccaataggagcgggcggtatgtttt

SEQ ID NO: 2191 - RNA, 110 nt, synthetic construct
  source 1..110: mol_type = other RNA
tatactgttcttccacactctggttgagaatcgaaagattcttaataaggcatccttccgatgctgacttctcaccgtccgttttccaataggagcgggcggtatgtttt

SEQ ID NO: 2192 - RNA, 110 nt, synthetic construct
  source 1..110: mol_type = other RNA
tactgttcttccacactctggagttgagaatcgaaagattcttaataaggcatccttccgatgctgacttctcaccgtccgttttccaataggagcgggcggtatgtttt

SEQ ID NO: 2193 - RNA, 110 nt, synthetic construct
  source 1..110: mol_type = other RNA
ttgtattcttttatcagctcaggttgagaatcgaaagattcttaataaggcatccttccgatgctgacttctcaccgtccgttttccaataggagcgggcggtatgtttt

SEQ ID NO: 2194 - RNA, 110 nt, synthetic construct
  source 1..110: mol_type = other RNA
ttcttttatcagctcagaaagagttgagaatcgaaagattcttaataaggcatccttccgatgctgacttctcaccgtccgttttccaataggagcgggcggtatgtttt

SEQ ID NO: 2195 - RNA, 110 nt, synthetic construct
  source 1..110: mol_type = other RNA
tcagctcagaaagactggtattgttgagaatcgaaagattcttaataaggcatccttccgatgctgacttctcaccgtccgttttccaataggagcgggcggtatgtttt

SEQ ID NO: 2196 - RNA, 110 nt, synthetic construct
  source 1..110: mol_type = other RNA
gaaaattctctttcttctaaatgttgagaatcgaaagattcttaataaggcatccttccgatgctgacttctcaccgtccgttttccaataggagcgggcggtatgtttt

SEQ ID NO: 2197 - RNA, 110 nt, synthetic construct
  source 1..110: mol_type = other RNA
aaattctctttcttctaaatcagttgagaatcgaaagattcttaataaggcatccttccgatgctgacttctcaccgtccgttttccaataggagcgggcggtatgtttt

SEQ ID NO: 2198 - RNA, 110 nt, synthetic construct
  source 1..110: mol_type = other RNA
ctttcttctaaatcaagagcacgttgagaatcgaaagattcttaataaggcatccttccgatgctgacttctcaccgtccgttttccaataggagcgggcggtatgtttt

SEQ ID NO: 2199 - RNA, 110 nt, synthetic construct
  source 1..110: mol_type = other RNA
tcaactgaacgaaacagaaaatgttgagaatcgaaagattcttaataaggcatccttccgatgctgacttctcaccgtccgttttccaataggagcgggcggtatgtttt

SEQ ID NO: 2200 - RNA, 110 nt, synthetic construct
  source 1..110: mol_type = other RNA
tctgtttcgttcagttgaagaggttgagaatcgaaagattcttaataaggcatccttccgatgctgacttctcaccgtccgttttccaataggagcgggcggtatgtttt

SEQ ID NO: 2201 - RNA, 110 nt, synthetic construct
  source 1..110: mol_type = other RNA
ttcgttcagttgaagagggggagttgagaatcgaaagattcttaataaggcatccttccgatgctgacttctcaccgtccgttttccaataggagcgggcggtatgtttt

SEQ ID NO: 2202 - RNA, 110 nt, synthetic construct
  source 1..110: mol_type = other RNA
agttgaagagggggagtagttcgttgagaatcgaaagattcttaataaggcatccttccgatgctgacttctcaccgtccgttttccaataggagcgggcggtatgtttt

SEQ ID NO: 2203 - RNA, 110 nt, synthetic construct
  source 1..110: mol_type = other RNA
tggtgctcttgatttagaagaagttgagaatcgaaagattcttaataaggcatccttccgatgctgacttctcaccgtccgttttccaataggagcgggcggtatgtttt

SEQ ID NO: 2204 - RNA, 110 nt, synthetic construct
  source 1..110: mol_type = other RNA
atttagaagaaagagaattttcgttgagaatcgaaagattcttaataaggcatccttccgatgctgacttctcaccgtccgttttccaataggagcgggcggtatgtttt

SEQ ID NO: 2205 - RNA, 110 nt, synthetic construct
  source 1..110: mol_type = other RNA
tttagaagaaagagaattttctgttgagaatcgaaagattcttaataaggcatccttccgatgctgacttctcaccgtccgttttccaataggagcgggcggtatgtttt

SEQ ID NO: 2206 - RNA, 110 nt, synthetic construct
  source 1..110: mol_type = other RNA
ttagaagaaagagaattttctggttgagaatcgaaagattcttaataaggcatccttccgatgctgacttctcaccgtccgttttccaataggagcgggcggtatgtttt

SEQ ID NO: 2207 - RNA, 110 nt, synthetic construct
  source 1..110: mol_type = other RNA
attttctgagggttcttgaatagttgagaatcgaaagattcttaataaggcatccttccgatgctgacttctcaccgtccgttttccaataggagcgggcggtatgtttt

SEQ ID NO: 2208 - RNA, 110 nt, synthetic construct
  source 1..110: mol_type = other RNA
tataacagaggcgaacatacaagttgagaatcgaaagattcttaataaggcatccttccgatgctgacttctcaccgtccgttttccaataggagcgggcggtatgtttt

SEQ ID NO: 2209 - RNA, 110 nt, synthetic construct
  source 1..110: mol_type = other RNA
cactattaaaccaagaaactccgttgagaatcgaaagattcttaataaggcatccttccgatgctgacttctcaccgtccgttttccaataggagcgggcggtatgtttt

SEQ ID NO: 2210 - RNA, 110 nt, synthetic construct
  source 1..110: mol_type = other RNA
  modified_base 1..3: mod_base = OTHER; note = 2'O-Methyl ribonucleotide
  modified_base 1..3: mod_base = OTHER; note = Phosphorothioate linkage
  modified_base 108..110: mod_base = OTHER; note = 2'O-Methyl ribonucleotide
  modified_base 107..109: mod_base = OTHER; note = Phosphorothioate linkage
actattaaaccaagaaactcccgttgagaatcgaaagattcttaataaggcatccttccgatgctgacttctcaccgtccgttttccaataggagcgggcggtatgtttt

SEQ ID NO: 2211 - RNA, 110 nt, synthetic construct
  source 1..110: mol_type = other RNA
ctattaaaccaagaaactcccagttgagaatcgaaagattcttaataaggcatccttccgatgctgacttctcaccgtccgttttccaataggagcgggcggtatgtttt

SEQ ID NO: 2212 - RNA, 110 nt, synthetic construct
  source 1..110: mol_type = other RNA
tgtttccatgggtttacctgatgttgagaatcgaaagattcttaataaggcatccttccgatgctgacttctcaccgtccgttttccaataggagcgggcggtatgtttt

SEQ ID NO: 2213 - RNA, 110 nt, synthetic construct
  source 1..110: mol_type = other RNA
atcacagtagacattaaaccctgttgagaatcgaaagattcttaataaggcatccttccgatgctgacttctcaccgtccgttttccaataggagcgggcggtatgtttt

SEQ ID NO: 2214 - RNA, 110 nt, synthetic construct
  source 1..110: mol_type = other RNA
cacagtagacattaaacccttggttgagaatcgaaagattcttaataaggcatccttccgatgctgacttctcaccgtccgttttccaataggagcgggcggtatgtttt

SEQ ID NO: 2215 - RNA, 110 nt, synthetic construct
  source 1..110: mol_type = other RNA
acattaaacccttgggagtttcgttgagaatcgaaagattcttaataaggcatccttccgatgctgacttctcaccgtccgttttccaataggagcgggcggtatgtttt

SEQ ID NO: 2216 - DNA, 22 bp, Homo sapiens
  source 1..22: mol_type = genomic DNA
gttgttcctttagtaattgcat

SEQ ID NO: 2217 - DNA, 22 bp, Homo sapiens
  source 1..22: mol_type = genomic DNA
tcctttagtaattgcatccaga

SEQ ID NO: 2218 - DNA, 22 bp, Homo sapiens
  source 1..22: mol_type = genomic DNA
agtaattgcatccagagtggat

SEQ ID NO: 2219 - DNA, 22 bp, Homo sapiens
  source 1..22: mol_type = genomic DNA
ttcatcatttgattctgcacct

SEQ ID NO: 2220 - DNA, 22 bp, Homo sapiens
  source 1..22: mol_type = genomic DNA
tctgcaccttcagagccaaaat

SEQ ID NO: 2221 - DNA, 22 bp, Homo sapiens
  source 1..22: mol_type = genomic DNA
gatgatgtcaaaattttagcga

SEQ ID NO: 2222 - DNA, 22 bp, Homo sapiens
  source 1..22: mol_type = genomic DNA
tttagcgaatggcctcctgcag

SEQ ID NO: 2223 - DNA, 22 bp, Homo sapiens
  source 1..22: mol_type = genomic DNA
aatggcctcctgcagctgggtc

SEQ ID NO: 2224 - DNA, 22 bp, Homo sapiens
  source 1..22: mol_type = genomic DNA
cctgcagctgggtcatggactt

SEQ ID NO: 2225 - DNA, 22 bp, Homo sapiens
  source 1..22: mol_type = genomic DNA
atggacttaaagattttgtcca

SEQ ID NO: 2226 - DNA, 22 bp, Homo sapiens
  source 1..22: mol_type = genomic DNA
taaagattttgtccataagact

SEQ ID NO: 2227 - DNA, 22 bp, Homo sapiens
  source 1..22: mol_type = genomic DNA
gacaaattaacgacatatttca

SEQ ID NO: 2228 - DNA, 22 bp, Homo sapiens
  source 1..22: mol_type = genomic DNA
ttcagaagctcaacatatttga

SEQ ID NO: 2229 - DNA, 22 bp, Homo sapiens
  source 1..22: mol_type = genomic DNA
caatgaaatcaaagaagaggaa

SEQ ID NO: 2230 - DNA, 22 bp, Homo sapiens
  source 1..22: mol_type = genomic DNA
aaagaagaggaaaaggagctaa

SEQ ID NO: 2231 - DNA, 22 bp, Homo sapiens
  source 1..22: mol_type = genomic DNA
tacaagttaaaaacgaggaggt

SEQ ID NO: 2232 - DNA, 22 bp, Homo sapiens
  source 1..22: mol_type = genomic DNA
cgaggaggtgaagaacatgtca

SEQ ID NO: 2233 - DNA, 22 bp, Homo sapiens
  source 1..22: mol_type = genomic DNA
acatgtcagtagaactgaactc

SEQ ID NO: 2234 - DNA, 22 bp, Homo sapiens
  source 1..22: mol_type = genomic DNA
cagtagaactgaactcaaagct

SEQ ID NO: 2235 - DNA, 22 bp, Homo sapiens
  source 1..22: mol_type = genomic DNA
gtagaactgaactcaaagcttg

SEQ ID NO: 2236 - DNA, 22 bp, Homo sapiens
  source 1..22: mol_type = genomic DNA
tgagagtctgctggaagagaag

SEQ ID NO: 2237 - DNA, 22 bp, Homo sapiens
  source 1..22: mol_type = genomic DNA
aagagaagacagcccttcaaca

SEQ ID NO: 2238 - DNA, 22 bp, Homo sapiens
  source 1..22: mol_type = genomic DNA
aagacagcccttcaacacaagg

SEQ ID NO: 2239 - DNA, 22 bp, Homo sapiens
  source 1..22: mol_type = genomic DNA
agacagcccttcaacacaaggt

SEQ ID NO: 2240 - DNA, 22 bp, Homo sapiens
  source 1..22: mol_type = genomic DNA
gacagcccttcaacacaaggtc

SEQ ID NO: 2241 - DNA, 22 bp, Homo sapiens
  source 1..22: mol_type = genomic DNA
tcaacacaaggtcagggctttg

SEQ ID NO: 2242 - DNA, 22 bp, Homo sapiens
  source 1..22: mol_type = genomic DNA
gagcagctaaccaacttaattc

SEQ ID NO: 2243 - DNA, 22 bp, Homo sapiens
  source 1..22: mol_type = genomic DNA
accaacttaattctaagcccag

SEQ ID NO: 2244 - DNA, 22 bp, Homo sapiens
  source 1..22: mol_type = genomic DNA
ccaacttaattctaagcccagc

SEQ ID NO: 2245 - DNA, 22 bp, Homo sapiens
  source 1..22: mol_type = genomic DNA
caacttaattctaagcccagct

SEQ ID NO: 2246 - DNA, 22 bp, Homo sapiens
  source 1..22: mol_type = genomic DNA
aattctaagcccagctggggct

SEQ ID NO: 2247 - DNA, 22 bp, Homo sapiens
  source 1..22: mol_type = genomic DNA
ttctaagcccagctggggctca

SEQ ID NO: 2248 - DNA, 22 bp, Homo sapiens
  source 1..22: mol_type = genomic DNA
ttactttgagtgatgttacttc

SEQ ID NO: 2249 - DNA, 22 bp, Homo sapiens
  source 1..22: mol_type = genomic DNA
tgatgttacttctgggtgctcc

SEQ ID NO: 2250 - DNA, 22 bp, Homo sapiens
  source 1..22: mol_type = genomic DNA
tctgggtgctcctgagccccag

SEQ ID NO: 2251 - DNA, 22 bp, Homo sapiens
  source 1..22: mol_type = genomic DNA
ctgggtgctcctgagccccagc

SEQ ID NO: 2252 - DNA, 22 bp, Homo sapiens
  source 1..22: mol_type = genomic DNA
tgctcctgagccccagctgggc

SEQ ID NO: 2253 - DNA, 22 bp, Homo sapiens
  source 1..22: mol_type = genomic DNA
taagttggttagctgctcctcc

SEQ ID NO: 2254 - DNA, 22 bp, Homo sapiens
  source 1..22: mol_type = genomic DNA
tccaaagccctgaccttgtgtt

SEQ ID NO: 2255 - DNA, 22 bp, Homo sapiens
  source 1..22: mol_type = genomic DNA
ccaaagccctgaccttgtgttg

SEQ ID NO: 2256 - DNA, 22 bp, Homo sapiens
  source 1..22: mol_type = genomic DNA
tgaagggctgtcttctcttcca

SEQ ID NO: 2257 - DNA, 22 bp, Homo sapiens
  source 1..22: mol_type = genomic DNA
gtcttctcttccagcagactct

SEQ ID NO: 2258 - DNA, 22 bp, Homo sapiens
  source 1..22: mol_type = genomic DNA
cttccagcagactctcaagctt

SEQ ID NO: 2259 - DNA, 22 bp, Homo sapiens
  source 1..22: mol_type = genomic DNA
agcagactctcaagctttgagt

SEQ ID NO: 2260 - DNA, 22 bp, Homo sapiens
  source 1..22: mol_type = genomic DNA
ttcacctcctcgtttttaactt

SEQ ID NO: 2261 - DNA, 22 bp, Homo sapiens
  source 1..22: mol_type = genomic DNA
gtttttaacttgtagtgtagat

SEQ ID NO: 2262 - DNA, 22 bp, Homo sapiens
  source 1..22: mol_type = genomic DNA
tgtagtgtagatgtagttcttc

SEQ ID NO: 2263 - DNA, 22 bp, Homo sapiens
  source 1..22: mol_type = genomic DNA
cttttcctcttctttgatttca

SEQ ID NO: 2264 - DNA, 22 bp, Homo sapiens
  source 1..22: mol_type = genomic DNA
ttgatttcattggttcgaagtg

SEQ ID NO: 2265 - DNA, 22 bp, Homo sapiens
  source 1..22: mol_type = genomic DNA
ggttcgaagtgataggtcataa

SEQ ID NO: 2266 - DNA, 22 bp, Homo sapiens
  source 1..22: mol_type = genomic DNA
taaaaagactgatcaaatatgt

SEQ ID NO: 2267 - DNA, 22 bp, Homo sapiens
  source 1..22: mol_type = genomic DNA
aaatatgtcgttaatttgtccc

SEQ ID NO: 2268 - DNA, 22 bp, Homo sapiens
  source 1..22: mol_type = genomic DNA
ttagtcttatggacaaaatctt

SEQ ID NO: 2269 - DNA, 22 bp, Homo sapiens
  source 1..22: mol_type = genomic DNA
ttaagtccatgacccagctgca

SEQ ID NO: 2270 - DNA, 22 bp, Homo sapiens
  source 1..22: mol_type = genomic DNA
tccaacatagcaaatcttgatt

SEQ ID NO: 2271 - DNA, 22 bp, Homo sapiens
  source 1..22: mol_type = genomic DNA
gcaaatcttgattttggctctg

SEQ ID NO: 2272 - DNA, 22 bp, Homo sapiens
  source 1..22: mol_type = genomic DNA
tcttgattttggctctgaaggt

SEQ ID NO: 2273 - DNA, 22 bp, Homo sapiens
  source 1..22: mol_type = genomic DNA
gaaggtgcagaatcaaatgatg

SEQ ID NO: 2274 - DNA, 22 bp, Homo sapiens
  source 1..22: mol_type = genomic DNA
aaggtgcagaatcaaatgatga

SEQ ID NO: 2275 - DNA, 22 bp, Homo sapiens
  source 1..22: mol_type = genomic DNA
gcagaatcaaatgatgaaaggt

SEQ ID NO: 2276 - DNA, 22 bp, Homo sapiens
  source 1..22: mol_type = genomic DNA
tccactctggatgcaattacta

SEQ ID NO: 2277 - DNA, 22 bp, Homo sapiens
  source 1..22: mol_type = genomic DNA
caattactaaaggaacaacaaa

SEQ ID NO: 2278 - DNA, 22 bp, Homo sapiens
  source 1..22: mol_type = genomic DNA
tacaatctgtgttcagagtttt

SEQ ID NO: 2279 - DNA, 22 bp, Homo sapiens
  source 1..22: mol_type = genomic DNA
agttttgtagaacagcaagaca

SEQ ID NO: 2280 - DNA, 22 bp, Homo sapiens
  source 1..22: mol_type = genomic DNA
agaacagcaagacaacagcata

SEQ ID NO: 2281 - DNA, 22 bp, Homo sapiens
  source 1..22: mol_type = genomic DNA
acaacagcataagagaactcct

SEQ ID NO: 2282 - DNA, 22 bp, Homo sapiens
  source 1..22: mol_type = genomic DNA
aacagcataagagaactcctcc

SEQ ID NO: 2283 - DNA, 22 bp, Homo sapiens
  source 1..22: mol_type = genomic DNA
aagagaactcctccagagtgtg

SEQ ID NO: 2284 - DNA, 22 bp, Homo sapiens
  source 1..22: mol_type = genomic DNA
aactcctccagagtgtggaaga

SEQ ID NO: 2285 - DNA, 22 bp, Homo sapiens
  source 1..22: mol_type = genomic DNA
aacagtataaacaattaagtca

SEQ ID NO: 2286 - DNA, 22 bp, Homo sapiens
  source 1..22: mol_type = genomic DNA
aaagaaatagaaaagcaggtaa

SEQ ID NO: 2287 - DNA, 22 bp, Homo sapiens
  source 1..22: mol_type = genomic DNA
tatactgttcttccacactctg

SEQ ID NO: 2288 - DNA, 22 bp, Homo sapiens
  source 1..22: mol_type = genomic DNA
tactgttcttccacactctgga

SEQ ID NO: 2289 - DNA, 22 bp, Homo sapiens
  source 1..22: mol_type = genomic DNA
ttgtattcttttatcagctcag

SEQ ID NO: 2290 - DNA, 22 bp, Homo sapiens
  source 1..22: mol_type = genomic DNA
ttcttttatcagctcagaaaga

SEQ ID NO: 2291 - DNA, 22 bp, Homo sapiens
  source 1..22: mol_type = genomic DNA
tcagctcagaaagactggtatt

SEQ ID NO: 2292 - DNA, 22 bp, Homo sapiens
  source 1..22: mol_type = genomic DNA
gaaaattctctttcttctaaat

SEQ ID NO: 2293 - DNA, 22 bp, Homo sapiens
  source 1..22: mol_type = genomic DNA
aaattctctttcttctaaatca

SEQ ID NO: 2294 - DNA, 22 bp, Homo sapiens
  source 1..22: mol_type = genomic DNA
ctttcttctaaatcaagagcac

SEQ ID NO: 2295 - DNA, 22 bp, Homo sapiens
  source 1..22: mol_type = genomic DNA
tcaactgaacgaaacagaaaat

SEQ ID NO: 2296 - DNA, 22 bp, Homo sapiens
  source 1..22: mol_type = genomic DNA
tctgtttcgttcagttgaagag

SEQ ID NO: 2297 - DNA, 22 bp, Homo sapiens
  source 1..22: mol_type = genomic DNA
ttcgttcagttgaagaggggga

SEQ ID NO: 2298 - DNA, 22 bp, Homo sapiens
  source 1..22: mol_type = genomic DNA
agttgaagagggggagtagttc

SEQ ID NO: 2299 - DNA, 22 bp, Homo sapiens
  source 1..22: mol_type = genomic DNA
tggtgctcttgatttagaagaa

SEQ ID NO: 2300 - DNA, 22 bp, Homo sapiens
  source 1..22: mol_type = genomic DNA
atttagaagaaagagaattttc

SEQ ID NO: 2301 - DNA, 22 bp, Homo sapiens
  source 1..22: mol_type = genomic DNA
tttagaagaaagagaattttct

SEQ ID NO: 2302 - DNA, 22 bp, Homo sapiens
  source 1..22: mol_type = genomic DNA
ttagaagaaagagaattttctg

SEQ ID NO: 2303 - DNA, 22 bp, Homo sapiens
  source 1..22: mol_type = genomic DNA
attttctgagggttcttgaata

SEQ ID NO: 2304 - DNA, 22 bp, Homo sapiens
  source 1..22: mol_type = genomic DNA
tataacagaggcgaacatacaa

SEQ ID NO: 2305 - DNA, 22 bp, Homo sapiens
  source 1..22: mol_type = genomic DNA
cactattaaaccaagaaactcc

SEQ ID NO: 2306 - DNA, 22 bp, Homo sapiens
  source 1..22: mol_type = genomic DNA
actattaaaccaagaaactccc

SEQ ID NO: 2307 - DNA, 22 bp, Homo sapiens
  source 1..22: mol_type = genomic DNA
ctattaaaccaagaaactccca

SEQ ID NO: 2308 - DNA, 22 bp, Homo sapiens
  source 1..22: mol_type = genomic DNA
tgtttccatgggtttacctgat

SEQ ID NO: 2309 - DNA, 22 bp, Homo sapiens
  source 1..22: mol_type = genomic DNA
atcacagtagacattaaaccct

SEQ ID NO: 2310 - DNA, 22 bp, Homo sapiens
  source 1..22: mol_type = genomic DNA
cacagtagacattaaacccttg

SEQ ID NO: 2311 - DNA, 22 bp, Homo sapiens
  source 1..22: mol_type = genomic DNA
acattaaacccttgggagtttc

SEQ ID NO: 2312 - RNA, 110 nt, synthetic construct
  source 1..110: mol_type = other RNA
cccttgggagtttcttggtttagttgagaatcgaaagattcttaataaggcatccttccgatgctgacttctcaccgtccgttttccaataggagcgggcggtatgtttt

SEQ ID NO: 2313 - RNA, 110 nt, synthetic construct
  source 1..110: mol_type = other RNA
atgttcgcctctgttataaacggttgagaatcgaaagattcttaataaggcatccttccgatgctgacttctcaccgtccgttttccaataggagcgggcggtatgtttt

SEQ ID NO: 2314 - RNA, 110 nt, synthetic construct
  source 1..110: mol_type = other RNA
taaacggcagagcagtcggcaggttgagaatcgaaagattcttaataaggcatccttccgatgctgacttctcaccgtccgttttccaataggagcgggcggtatgtttt

SEQ ID NO: 2315 - RNA, 110 nt, synthetic construct
  source 1..110: mol_type = other RNA
aaacggcagagcagtcggcagggttgagaatcgaaagattcttaataaggcatccttccgatgctgacttctcaccgtccgttttccaataggagcgggcggtatgtttt

SEQ ID NO: 2316 - RNA, 110 nt, synthetic construct
  source 1..110: mol_type = other RNA
gcagagcagtcggcaggaaggtgttgagaatcgaaagattcttaataaggcatccttccgatgctgacttctcaccgtccgttttccaataggagcgggcggtatgtttt

SEQ ID NO: 2317 - RNA, 110 nt, synthetic construct
  source 1..110: mol_type = other RNA
acattaattcaacaccggaaaggttgagaatcgaaagattcttaataaggcatccttccgatgctgacttctcaccgtccgttttccaataggagcgggcggtatgtttt

SEQ ID NO: 2318 - RNA, 110 nt, synthetic construct
  source 1..110: mol_type = other RNA
ttcaacaccggaaagatggctcgttgagaatcgaaagattcttaataaggcatccttccgatgctgacttctcaccgtccgttttccaataggagcgggcggtatgtttt

SEQ ID NO: 2319 - RNA, 110 nt, synthetic construct
  source 1..110: mol_type = other RNA
tcaacaccggaaagatggctcagttgagaatcgaaagattcttaataaggcatccttccgatgctgacttctcaccgtccgttttccaataggagcgggcggtatgtttt

SEQ ID NO: 2320 - RNA, 110 nt, synthetic construct
  source 1..110: mol_type = other RNA
acgaaacatgggaaaactacgagttgagaatcgaaagattcttaataaggcatccttccgatgctgacttctcaccgtccgttttccaataggagcgggcggtatgtttt

SEQ ID NO: 2321 - RNA, 110 nt, synthetic construct
  source 1..110: mol_type = other RNA
cgaaacatgggaaaactacgaagttgagaatcgaaagattcttaataaggcatccttccgatgctgacttctcaccgtccgttttccaataggagcgggcggtatgtttt

SEQ ID NO: 2322 - RNA, 110 nt, synthetic construct
  source 1..110: mol_type = other RNA
gaaacatgggaaaactacgaaagttgagaatcgaaagattcttaataaggcatccttccgatgctgacttctcaccgtccgttttccaataggagcgggcggtatgtttt

SEQ ID NO: 2323 - RNA, 110 nt, synthetic construct
  source 1..110: mol_type = other RNA
gaaaactacgaaaagggctttggttgagaatcgaaagattcttaataaggcatccttccgatgctgacttctcaccgtccgttttccaataggagcgggcggtatgtttt

SEQ ID NO: 2324 - RNA, 110 nt, synthetic construct
  source 1..110: mol_type = other RNA
aaaactacgaaaagggctttgggttgagaatcgaaagattcttaataaggcatccttccgatgctgacttctcaccgtccgttttccaataggagcgggcggtatgtttt

SEQ ID NO: 2325 - RNA, 110 nt, synthetic construct
  source 1..110: mol_type = other RNA
tcactttaccatcgagcctcccgttgagaatcgaaagattcttaataaggcatccttccgatgctgacttctcaccgtccgttttccaataggagcgggcggtatgtttt

SEQ ID NO: 2326 - RNA, 110 nt, synthetic construct
  source 1..110: mol_type = other RNA
cgagcctcccaaagcccttttcgttgagaatcgaaagattcttaataaggcatccttccgatgctgacttctcaccgtccgttttccaataggagcgggcggtatgtttt

SEQ ID NO: 2327 - RNA, 110 nt, synthetic construct
  source 1..110: mol_type = other RNA
cgtagttttcccatgtttcgttgttgagaatcgaaagattcttaataaggcatccttccgatgctgacttctcaccgtccgttttccaataggagcgggcggtatgtttt

SEQ ID NO: 2328 - RNA, 110 nt, synthetic construct
  source 1..110: mol_type = other RNA
tgaagtcctgtgagccatctttgttgagaatcgaaagattcttaataaggcatccttccgatgctgacttctcaccgtccgttttccaataggagcgggcggtatgtttt

SEQ ID NO: 2329 - RNA, 110 nt, synthetic construct
  source 1..110: mol_type = other RNA
ttccggtgttgaattaatgtccgttgagaatcgaaagattcttaataaggcatccttccgatgctgacttctcaccgtccgttttccaataggagcgggcggtatgtttt

SEQ ID NO: 2330 - RNA, 110 nt, synthetic construct
  source 1..110: mol_type = other RNA
aattaatgtccatggactgcctgttgagaatcgaaagattcttaataaggcatccttccgatgctgacttctcaccgtccgttttccaataggagcgggcggtatgtttt

SEQ ID NO: 2331 - RNA, 110 nt, synthetic construct
  source 1..110: mol_type = other RNA
ttaatgtccatggactgcctgggttgagaatcgaaagattcttaataaggcatccttccgatgctgacttctcaccgtccgttttccaataggagcgggcggtatgtttt

SEQ ID NO: 2332 - RNA, 110 nt, synthetic construct
  source 1..110: mol_type = other RNA
tttttctttaggagaattttgggttgagaatcgaaagattcttaataaggcatccttccgatgctgacttctcaccgtccgttttccaataggagcgggcggtatgtttt

SEQ ID NO: 2333 - RNA, 110 nt, synthetic construct
  source 1..110: mol_type = other RNA
ttttctttaggagaattttggtgttgagaatcgaaagattcttaataaggcatccttccgatgctgacttctcaccgtccgttttccaataggagcgggcggtatgtttt

SEQ ID NO: 2334 - RNA, 110 nt, synthetic construct
  source 1..110: mol_type = other RNA
gagaattttggttgggcctagagttgagaatcgaaagattcttaataaggcatccttccgatgctgacttctcaccgtccgttttccaataggagcgggcggtatgtttt

SEQ ID NO: 2335 - RNA, 110 nt, synthetic construct
  source 1..110: mol_type = other RNA
gggcctagagaagatctatgctgttgagaatcgaaagattcttaataaggcatccttccgatgctgacttctcaccgtccgttttccaataggagcgggcggtatgtttt

SEQ ID NO: 2336 - RNA, 110 nt, synthetic construct
  source 1..110: mol_type = other RNA
agaagatctatgctatagtccagttgagaatcgaaagattcttaataaggcatccttccgatgctgacttctcaccgtccgttttccaataggagcgggcggtatgtttt

SEQ ID NO: 2337 - RNA, 110 nt, synthetic construct
  source 1..110: mol_type = other RNA
ctacattttacgactcgagctagttgagaatcgaaagattcttaataaggcatccttccgatgctgacttctcaccgtccgttttccaataggagcgggcggtatgtttt

SEQ ID NO: 2338 - RNA, 110 nt, synthetic construct
  source 1..110: mol_type = other RNA
agctacaagactggaaagacaggttgagaatcgaaagattcttaataaggcatccttccgatgctgacttctcaccgtccgttttccaataggagcgggcggtatgtttt

SEQ ID NO: 2339 - RNA, 110 nt, synthetic construct
  source 1..110: mol_type = other RNA
ctcagccacatgtagcgtgtaggttgagaatcgaaagattcttaataaggcatccttccgatgctgacttctcaccgtccgttttccaataggagcgggcggtatgtttt

SEQ ID NO: 2340 - RNA, 110 nt, synthetic construct
  source 1..110: mol_type = other RNA
ggtttcgtgactgcccaggtgagttgagaatcgaaagattcttaataaggcatccttccgatgctgacttctcaccgtccgttttccaataggagcgggcggtatgtttt

SEQ ID NO: 2341 - RNA, 110 nt, synthetic construct
  source 1..110: mol_type = other RNA
tttcgtgactgcccaggtgaaagttgagaatcgaaagattcttaataaggcatccttccgatgctgacttctcaccgtccgttttccaataggagcgggcggtatgtttt

SEQ ID NO: 2342 - RNA, 110 nt, synthetic construct
  source 1..110: mol_type = other RNA
ccaggtgaaaggagtattcaacgttgagaatcgaaagattcttaataaggcatccttccgatgctgacttctcaccgtccgttttccaataggagcgggcggtatgtttt

SEQ ID NO: 2343 - RNA, 110 nt, synthetic construct
  source 1..110: mol_type = other RNA
caacgtagtgcttgctgtctttgttgagaatcgaaagattcttaataaggcatccttccgatgctgacttctcaccgtccgttttccaataggagcgggcggtatgtttt

SEQ ID NO: 2344 - RNA, 110 nt, synthetic construct
  source 1..110: mol_type = other RNA
tgcttgctgtctttccagtcttgttgagaatcgaaagattcttaataaggcatccttccgatgctgacttctcaccgtccgttttccaataggagcgggcggtatgtttt

SEQ ID NO: 2345 - RNA, 110 nt, synthetic construct
  source 1..110: mol_type = other RNA
tagctcgagtcgtaaaatgtaggttgagaatcgaaagattcttaataaggcatccttccgatgctgacttctcaccgtccgttttccaataggagcgggcggtatgtttt

SEQ ID NO: 2346 - RNA, 110 nt, synthetic construct
  source 1..110: mol_type = other RNA
gtcgtaaaatgtagttagactggttgagaatcgaaagattcttaataaggcatccttccgatgctgacttctcaccgtccgttttccaataggagcgggcggtatgtttt

SEQ ID NO: 2347 - RNA, 110 nt, synthetic construct
  source 1..110: mol_type = other RNA
aatgtagttagactgttggactgttgagaatcgaaagattcttaataaggcatccttccgatgctgacttctcaccgtccgttttccaataggagcgggcggtatgtttt

SEQ ID NO: 2348 - RNA, 110 nt, synthetic construct
  source 1..110: mol_type = other RNA
agttagactgttggactatagcgttgagaatcgaaagattcttaataaggcatccttccgatgctgacttctcaccgtccgttttccaataggagcgggcggtatgtttt

SEQ ID NO: 2349 - RNA, 110 nt, synthetic construct
  source 1..110: mol_type = other RNA
tggactatagcatagatcttctgttgagaatcgaaagattcttaataaggcatccttccgatgctgacttctcaccgtccgttttccaataggagcgggcggtatgtttt

SEQ ID NO: 2350 - RNA, 110 nt, synthetic construct
  source 1..110: mol_type = other RNA
ggactatagcatagatcttctcgttgagaatcgaaagattcttaataaggcatccttccgatgctgacttctcaccgtccgttttccaataggagcgggcggtatgtttt

SEQ ID NO: 2351 - DNA, 22 bp, Homo sapiens
  source 1..22: mol_type = genomic DNA
cccttgggagtttcttggttta

SEQ ID NO: 2352 - DNA, 22 bp, Homo sapiens
  source 1..22: mol_type = genomic DNA
atgttcgcctctgttataaacg

SEQ ID NO: 2353 - DNA, 22 bp, Homo sapiens
  source 1..22: mol_type = genomic DNA
taaacggcagagcagtcggcag

SEQ ID NO: 2354 - DNA, 22 bp, Homo sapiens
  source 1..22: mol_type = genomic DNA
aaacggcagagcagtcggcagg

SEQ ID NO: 2355 - DNA, 22 bp, Homo sapiens
  source 1..22: mol_type = genomic DNA
gcagagcagtcggcaggaaggt

SEQ ID NO: 2356 - DNA, 22 bp, Homo sapiens
  source 1..22: mol_type = genomic DNA
acattaattcaacaccggaaag

SEQ ID NO: 2357 - DNA, 22 bp, Homo sapiens
  source 1..22: mol_type = genomic DNA
ttcaacaccggaaagatggctc

SEQ ID NO: 2358 - DNA, 22 bp, Homo sapiens
  source 1..22: mol_type = genomic DNA
tcaacaccggaaagatggctca

SEQ ID NO: 2359 - DNA, 22 bp, Homo sapiens
  source 1..22: mol_type = genomic DNA
acgaaacatgggaaaactacga

SEQ ID NO: 2360 - DNA, 22 bp, Homo sapiens
  source 1..22: mol_type = genomic DNA
cgaaacatgggaaaactacgaa

SEQ ID NO: 2361 - DNA, 22 bp, Homo sapiens
  source 1..22: mol_type = genomic DNA
gaaacatgggaaaactacgaaa

SEQ ID NO: 2362 - DNA, 22 bp, Homo sapiens
  source 1..22: mol_type = genomic DNA
gaaaactacgaaaagggctttg

SEQ ID NO: 2363 - DNA, 22 bp, Homo sapiens
  source 1..22: mol_type = genomic DNA
aaaactacgaaaagggctttgg

SEQ ID NO: 2364 - DNA, 22 bp, Homo sapiens
  source 1..22: mol_type = genomic DNA
tcactttaccatcgagcctccc

SEQ ID NO: 2365 - DNA, 22 bp, Homo sapiens
  source 1..22: mol_type = genomic DNA
cgagcctcccaaagcccttttc

SEQ ID NO: 2366 - DNA, 22 bp, Homo sapiens
  source 1..22: mol_type = genomic DNA
cgtagttttcccatgtttcgtt

SEQ ID NO: 2367 - DNA, 22 bp, Homo sapiens
  source 1..22: mol_type = genomic DNA
tgaagtcctgtgagccatcttt

SEQ ID NO: 2368 - DNA, 22 bp, Homo sapiens
  source 1..22: mol_type = genomic DNA
ttccggtgttgaattaatgtcc

SEQ ID NO: 2369 - DNA, 22 bp, Homo sapiens
  source 1..22: mol_type = genomic DNA
aattaatgtccatggactgcct

SEQ ID NO: 2370 - DNA, 22 bp, Homo sapiens
  source 1..22: mol_type = genomic DNA
ttaatgtccatggactgcctgg

SEQ ID NO: 2371 - DNA, 22 bp, Homo sapiens
  source 1..22: mol_type = genomic DNA
tttttctttaggagaattttgg

SEQ ID NO: 2372 - DNA, 22 bp, Homo sapiens
  source 1..22: mol_type = genomic DNA
ttttctttaggagaattttggt

SEQ ID NO: 2373 - DNA, 22 bp, Homo sapiens
  source 1..22: mol_type = genomic DNA
gagaattttggttgggcctaga

SEQ ID NO: 2374 - DNA, 22 bp, Homo sapiens
  source 1..22: mol_type = genomic DNA
gggcctagagaagatctatgct

SEQ ID NO: 2375 - DNA, 22 bp, Homo sapiens
  source 1..22: mol_type = genomic DNA
agaagatctatgctatagtcca

SEQ ID NO: 2376 - DNA, 22 bp, Homo sapiens
  source 1..22: mol_type = genomic DNA
ctacattttacgactcgagcta

SEQ ID NO: 2377 - DNA, 22 bp, Homo sapiens
  source 1..22: mol_type = genomic DNA
agctacaagactggaaagacag

SEQ ID NO: 2378 - DNA, 22 bp, Homo sapiens
  source 1..22: mol_type = genomic DNA
ctcagccacatgtagcgtgtag

SEQ ID NO: 2379 - DNA, 22 bp, Homo sapiens
  source 1..22: mol_type = genomic DNA
ggtttcgtgactgcccaggtga

SEQ ID NO: 2380 - DNA, 22 bp, Homo sapiens
  source 1..22: mol_type = genomic DNA
tttcgtgactgcccaggtgaaa

SEQ ID NO: 2381 - DNA, 22 bp, Homo sapiens
  source 1..22: mol_type = genomic DNA
ccaggtgaaaggagtattcaac

SEQ ID NO: 2382 - DNA, 22 bp, Homo sapiens
  source 1..22: mol_type = genomic DNA
caacgtagtgcttgctgtcttt

SEQ ID NO: 2383 - DNA, 22 bp, Homo sapiens
  source 1..22: mol_type = genomic DNA
tgcttgctgtctttccagtctt

SEQ ID NO: 2384 - DNA, 22 bp, Homo sapiens
  source 1..22: mol_type = genomic DNA
tagctcgagtcgtaaaatgtag

SEQ ID NO: 2385 - DNA, 22 bp, Homo sapiens
  source 1..22: mol_type = genomic DNA
gtcgtaaaatgtagttagactg

SEQ ID NO: 2386 - DNA, 22 bp, Homo sapiens
  source 1..22: mol_type = genomic DNA
aatgtagttagactgttggact

SEQ ID NO: 2387 - DNA, 22 bp, Homo sapiens
  source 1..22: mol_type = genomic DNA
agttagactgttggactatagc

SEQ ID NO: 2388 - DNA, 22 bp, Homo sapiens
  source 1..22: mol_type = genomic DNA
tggactatagcatagatcttct

SEQ ID NO: 2389 - DNA, 22 bp, Homo sapiens
  source 1..22: mol_type = genomic DNA
ggactatagcatagatcttctc

SEQ ID NO: 2390 - RNA, 110 nt, synthetic construct
  source 1..110: mol_type = other RNA
agtcctcttggcccacagacatgttgagaatcgaaagattcttaataaggcatccttccgatgctgacttctcaccgtccgttttccaataggagcgggcggtatgtttt

SEQ ID NO: 2391 - RNA, 110 nt, synthetic construct
  source 1..110: mol_type = other RNA
ttggcccacagacatccagaacgttgagaatcgaaagattcttaataaggcatccttccgatgctgacttctcaccgtccgttttccaataggagcgggcggtatgtttt

SEQ ID NO: 2392 - RNA, 110 nt, synthetic construct
  source 1..110: mol_type = other RNA
agaacctgctgtgtaccagttagttgagaatcgaaagattcttaataaggcatccttccgatgctgacttctcaccgtccgttttccaataggagcgggcggtatgtttt

SEQ ID NO: 2393 - RNA, 110 nt, synthetic construct
  source 1..110: mol_type = other RNA
ctgtgtaccagttaaaagatccgttgagaatcgaaagattcttaataaggcatccttccgatgctgacttctcaccgtccgttttccaataggagcgggcggtatgtttt

SEQ ID NO: 2394 - RNA, 110 nt, synthetic construct
  source 1..110: mol_type = other RNA
accagttaaaagatcctcggtcgttgagaatcgaaagattcttaataaggcatccttccgatgctgacttctcaccgtccgttttccaataggagcgggcggtatgtttt

SEQ ID NO: 2395 - RNA, 110 nt, synthetic construct
  source 1..110: mol_type = other RNA
ttaaaagatcctcggtctcagggttgagaatcgaaagattcttaataaggcatccttccgatgctgacttctcaccgtccgttttccaataggagcgggcggtatgtttt

SEQ ID NO: 2396 - RNA, 110 nt, synthetic construct
  source 1..110: mol_type = other RNA
ccaaatcaatgtgccgaaaaccgttgagaatcgaaagattcttaataaggcatccttccgatgctgacttctcaccgtccgttttccaataggagcgggcggtatgtttt

SEQ ID NO: 2397 - RNA, 110 nt, synthetic construct
  source 1..110: mol_type = other RNA
aatgtgccgaaaaccatggaatgttgagaatcgaaagattcttaataaggcatccttccgatgctgacttctcaccgtccgttttccaataggagcgggcggtatgtttt

SEQ ID NO: 2398 - RNA, 110 nt, synthetic construct
  source 1..110: mol_type = other RNA
aactgtgctggacatgaaagctgttgagaatcgaaagattcttaataaggcatccttccgatgctgacttctcaccgtccgttttccaataggagcgggcggtatgtttt

SEQ ID NO: 2399 - RNA, 110 nt, synthetic construct
  source 1..110: mol_type = other RNA
tggacatgaaagctatggattcgttgagaatcgaaagattcttaataaggcatccttccgatgctgacttctcaccgtccgttttccaataggagcgggcggtatgtttt

SEQ ID NO: 2400 - RNA, 110 nt, synthetic construct
  source 1..110: mol_type = other RNA
aaagctatggattccaagagcagttgagaatcgaaagattcttaataaggcatccttccgatgctgacttctcaccgtccgttttccaataggagcgggcggtatgtttt

SEQ ID NO: 2401 - RNA, 110 nt, synthetic construct
  source 1..110: mol_type = other RNA
aagctatggattccaagagcaagttgagaatcgaaagattcttaataaggcatccttccgatgctgacttctcaccgtccgttttccaataggagcgggcggtatgtttt

SEQ ID NO: 2402 - RNA, 110 nt, synthetic construct
  source 1..110: mol_type = other RNA
ccaagagcaatggggccattgcgttgagaatcgaaagattcttaataaggcatccttccgatgctgacttctcaccgtccgttttccaataggagcgggcggtatgtttt

SEQ ID NO: 2403 - RNA, 110 nt, synthetic construct
  source 1..110: mol_type = other RNA
gccattgcctggagcaaccagagttgagaatcgaaagattcttaataaggcatccttccgatgctgacttctcaccgtccgttttccaataggagcgggcggtatgtttt

SEQ ID NO: 2404 - RNA, 110 nt, synthetic construct
  source 1..110: mol_type = other RNA
tcacctgccaagatatcttcaagttgagaatcgaaagattcttaataaggcatccttccgatgctgacttctcaccgtccgttttccaataggagcgggcggtatgtttt

SEQ ID NO: 2405 - RNA, 110 nt, synthetic construct
  source 1..110: mol_type = other RNA
aaagagaccaacgccacctaccgttgagaatcgaaagattcttaataaggcatccttccgatgctgacttctcaccgtccgttttccaataggagcgggcggtatgtttt

SEQ ID NO: 2406 - RNA, 110 nt, synthetic construct
  source 1..110: mol_type = other RNA
ccacctaccccagttcaggtgagttgagaatcgaaagattcttaataaggcatccttccgatgctgacttctcaccgtccgttttccaataggagcgggcggtatgtttt

SEQ ID NO: 2407 - RNA, 110 nt, synthetic construct
  source 1..110: mol_type = other RNA
tctggggcaccactcacctgaagttgagaatcgaaagattcttaataaggcatccttccgatgctgacttctcaccgtccgttttccaataggagcgggcggtatgtttt

SEQ ID NO: 2408 - RNA, 110 nt, synthetic construct
  source 1..110: mol_type = other RNA
ccactcacctgaactggggtaggttgagaatcgaaagattcttaataaggcatccttccgatgctgacttctcaccgtccgttttccaataggagcgggcggtatgtttt

SEQ ID NO: 2409 - RNA, 110 nt, synthetic construct
  source 1..110: mol_type = other RNA
acctgaactggggtaggtggcggttgagaatcgaaagattcttaataaggcatccttccgatgctgacttctcaccgtccgttttccaataggagcgggcggtatgtttt

SEQ ID NO: 2410 - RNA, 110 nt, synthetic construct
  source 1..110: mol_type = other RNA
ctttgaagatatcttggcaggtgttgagaatcgaaagattcttaataaggcatccttccgatgctgacttctcaccgtccgttttccaataggagcgggcggtatgtttt

SEQ ID NO: 2411 - RNA, 110 nt, synthetic construct
  source 1..110: mol_type = other RNA
gcttgtctggttgctccaggcagttgagaatcgaaagattcttaataaggcatccttccgatgctgacttctcaccgtccgttttccaataggagcgggcggtatgtttt

SEQ ID NO: 2412 - RNA, 110 nt, synthetic construct
  source 1..110: mol_type = other RNA
ccaggcaatggccccattgctcgttgagaatcgaaagattcttaataaggcatccttccgatgctgacttctcaccgtccgttttccaataggagcgggcggtatgtttt

SEQ ID NO: 2413 - RNA, 110 nt, synthetic construct
  source 1..110: mol_type = other RNA
ggccccattgctcttggaatccgttgagaatcgaaagattcttaataaggcatccttccgatgctgacttctcaccgtccgttttccaataggagcgggcggtatgtttt

SEQ ID NO: 2414 - RNA, 110 nt, synthetic construct
  source 1..110: mol_type = other RNA
ttggaatccatagctttcatgtgttgagaatcgaaagattcttaataaggcatccttccgatgctgacttctcaccgtccgttttccaataggagcgggcggtatgtttt

SEQ ID NO: 2415 - RNA, 110 nt, synthetic construct
  source 1..110: mol_type = other RNA
atccatagctttcatgtccagcgttgagaatcgaaagattcttaataaggcatccttccgatgctgacttctcaccgtccgttttccaataggagcgggcggtatgtttt

SEQ ID NO: 2416 - RNA, 110 nt, synthetic construct
  source 1..110: mol_type = other RNA
agttttgtcagtgatgaacgttgttgagaatcgaaagattcttaataaggcatccttccgatgctgacttctcaccgtccgttttccaataggagcgggcggtatgtttt

SEQ ID NO: 2417 - RNA, 110 nt, synthetic construct
  source 1..110: mol_type = other RNA
agtgatgaacgttccagattccgttgagaatcgaaagattcttaataaggcatccttccgatgctgacttctcaccgtccgttttccaataggagcgggcggtatgtttt

SEQ ID NO: 2418 - RNA, 110 nt, synthetic construct
  source 1..110: mol_type = other RNA
aacgttccagattccatggtttgttgagaatcgaaagattcttaataaggcatccttccgatgctgacttctcaccgtccgttttccaataggagcgggcggtatgtttt

SEQ ID NO: 2419 - RNA, 110 nt, synthetic construct
  source 1..110: mol_type = other RNA
catggttttcggcacattgattgttgagaatcgaaagattcttaataaggcatccttccgatgctgacttctcaccgtccgttttccaataggagcgggcggtatgtttt

SEQ ID NO: 2420 - RNA, 110 nt, synthetic construct
  source 1..110: mol_type = other RNA
gagtcaaagtcggtgaacaggcgttgagaatcgaaagattcttaataaggcatccttccgatgctgacttctcaccgtccgttttccaataggagcgggcggtatgtttt

SEQ ID NO: 2421 - RNA, 110 nt, synthetic construct
  source 1..110: mol_type = other RNA
gtcaaagtcggtgaacaggcaggttgagaatcgaaagattcttaataaggcatccttccgatgctgacttctcaccgtccgttttccaataggagcgggcggtatgtttt

SEQ ID NO: 2422 - RNA, 110 nt, synthetic construct
  source 1..110: mol_type = other RNA
gaacaggcagagggtgctgtccgttgagaatcgaaagattcttaataaggcatccttccgatgctgacttctcaccgtccgttttccaataggagcgggcggtatgtttt

SEQ ID NO: 2423 - RNA, 110 nt, synthetic construct
  source 1..110: mol_type = other RNA
gcagagggtgctgtcctgagacgttgagaatcgaaagattcttaataaggcatccttccgatgctgacttctcaccgtccgttttccaataggagcgggcggtatgtttt

SEQ ID NO: 2424 - RNA, 110 nt, synthetic construct
  source 1..110: mol_type = other RNA
cagagggtgctgtcctgagaccgttgagaatcgaaagattcttaataaggcatccttccgatgctgacttctcaccgtccgttttccaataggagcgggcggtatgtttt

SEQ ID NO: 2425 - RNA, 110 nt, synthetic construct
  source 1..110: mol_type = other RNA
cctgagaccgaggatcttttaagttgagaatcgaaagattcttaataaggcatccttccgatgctgacttctcaccgtccgttttccaataggagcgggcggtatgtttt

SEQ ID NO: 2426 - RNA, 110 nt, synthetic construct
  source 1..110: mol_type = other RNA
aggatcttttaactggtacacagttgagaatcgaaagattcttaataaggcatccttccgatgctgacttctcaccgtccgttttccaataggagcgggcggtatgtttt

SEQ ID NO: 2427 - RNA, 110 nt, synthetic construct
  source 1..110: mol_type = other RNA
ggatcttttaactggtacacaggttgagaatcgaaagattcttaataaggcatccttccgatgctgacttctcaccgtccgttttccaataggagcgggcggtatgtttt

SEQ ID NO: 2428 - RNA, 110 nt, synthetic construct
  source 1..110: mol_type = other RNA
tttaactggtacacagcaggttgttgagaatcgaaagattcttaataaggcatccttccgatgctgacttctcaccgtccgttttccaataggagcgggcggtatgtttt

SEQ ID NO: 2429 - RNA, 110 nt, synthetic construct
  source 1..110: mol_type = other RNA
ttaactggtacacagcaggttcgttgagaatcgaaagattcttaataaggcatccttccgatgctgacttctcaccgtccgttttccaataggagcgggcggtatgtttt

SEQ ID NO: 2430 - RNA, 110 nt, synthetic construct
  source 1..110: mol_type = other RNA
aggttctgggttctggatgtctgttgagaatcgaaagattcttaataaggcatccttccgatgctgacttctcaccgtccgttttccaataggagcgggcggtatgtttt

SEQ ID NO: 2431 - RNA, 110 nt, synthetic construct
  source 1..110: mol_type = other RNA
tgtgatgccacgttgactgagagttgagaatcgaaagattcttaataaggcatccttccgatgctgacttctcaccgtccgttttccaataggagcgggcggtatgtttt

SEQ ID NO: 2432 - RNA, 110 nt, synthetic construct
  source 1..110: mol_type = other RNA
agacccttctcttacctgtttcgttgagaatcgaaagattcttaataaggcatccttccgatgctgacttctcaccgtccgttttccaataggagcgggcggtatgtttt

SEQ ID NO: 2433 - RNA, 110 nt, synthetic construct
  source 1..110: mol_type = other RNA
ttcaaagcttttctcagtcaacgttgagaatcgaaagattcttaataaggcatccttccgatgctgacttctcaccgtccgttttccaataggagcgggcggtatgtttt

SEQ ID NO: 2434 - RNA, 110 nt, synthetic construct
  source 1..110: mol_type = other RNA
ttctcagtcaacgtggcatcacgttgagaatcgaaagattcttaataaggcatccttccgatgctgacttctcaccgtccgttttccaataggagcgggcggtatgtttt

SEQ ID NO: 2435 - RNA, 110 nt, synthetic construct
  source 1..110: mol_type = other RNA
aaactttcaaaacctgtcagttgttgagaatcgaaagattcttaataaggcatccttccgatgctgacttctcaccgtccgttttccaataggagcgggcggtatgtttt

SEQ ID NO: 2436 - RNA, 110 nt, synthetic construct
  source 1..110: mol_type = other RNA
aactttcaaaacctgtcagttagttgagaatcgaaagattcttaataaggcatccttccgatgctgacttctcaccgtccgttttccaataggagcgggcggtatgtttt

SEQ ID NO: 2437 - RNA, 110 nt, synthetic construct
  source 1..110: mol_type = other RNA
cgaatcctcctgctgaaagtaggttgagaatcgaaagattcttaataaggcatccttccgatgctgacttctcaccgtccgttttccaataggagcgggcggtatgtttt

SEQ ID NO: 2438 - RNA, 110 nt, synthetic construct
  source 1..110: mol_type = other RNA
ggatttaacctgctcatgacgcgttgagaatcgaaagattcttaataaggcatccttccgatgctgacttctcaccgtccgttttccaataggagcgggcggtatgtttt

SEQ ID NO: 2439 - RNA, 110 nt, synthetic construct
  source 1..110: mol_type = other RNA
acctgctcatgacgctgaggctgttgagaatcgaaagattcttaataaggcatccttccgatgctgacttctcaccgtccgttttccaataggagcgggcggtatgtttt

SEQ ID NO: 2440 - RNA, 110 nt, synthetic construct
  source 1..110: mol_type = other RNA
gctgtggtccagttgaggtaaggttgagaatcgaaagattcttaataaggcatccttccgatgctgacttctcaccgtccgttttccaataggagcgggcggtatgtttt

SEQ ID NO: 2441 - RNA, 110 nt, synthetic construct
  source 1..110: mol_type = other RNA
ctttcatgccttcttacctcaagttgagaatcgaaagattcttaataaggcatccttccgatgctgacttctcaccgtccgttttccaataggagcgggcggtatgtttt

SEQ ID NO: 2442 - RNA, 110 nt, synthetic construct
  source 1..110: mol_type = other RNA
gccttcttacctcaactggaccgttgagaatcgaaagattcttaataaggcatccttccgatgctgacttctcaccgtccgttttccaataggagcgggcggtatgtttt

SEQ ID NO: 2443 - RNA, 110 nt, synthetic construct
  source 1..110: mol_type = other RNA
ttacctcaactggaccacagccgttgagaatcgaaagattcttaataaggcatccttccgatgctgacttctcaccgtccgttttccaataggagcgggcggtatgtttt

SEQ ID NO: 2444 - RNA, 110 nt, synthetic construct
  source 1..110: mol_type = other RNA
gaccacagcctcagcgtcatgagttgagaatcgaaagattcttaataaggcatccttccgatgctgacttctcaccgtccgttttccaataggagcgggcggtatgtttt

SEQ ID NO: 2445 - RNA, 110 nt, synthetic construct
  source 1..110: mol_type = other RNA
ttaaatccggctactttcagcagttgagaatcgaaagattcttaataaggcatccttccgatgctgacttctcaccgtccgttttccaataggagcgggcggtatgtttt

SEQ ID NO: 2446 - RNA, 110 nt, synthetic construct
  source 1..110: mol_type = other RNA
taaatccggctactttcagcaggttgagaatcgaaagattcttaataaggcatccttccgatgctgacttctcaccgtccgttttccaataggagcgggcggtatgtttt

SEQ ID NO: 2447 - RNA, 110 nt, synthetic construct
  source 1..110: mol_type = other RNA
cggctactttcagcaggaggatgttgagaatcgaaagattcttaataaggcatccttccgatgctgacttctcaccgtccgttttccaataggagcgggcggtatgtttt

SEQ ID NO: 2448 - RNA, 110 nt, synthetic construct
  source 1..110: mol_type = other RNA
gctactttcagcaggaggattcgttgagaatcgaaagattcttaataaggcatccttccgatgctgacttctcaccgtccgttttccaataggagcgggcggtatgtttt

SEQ ID NO: 2449 - RNA, 110 nt, synthetic construct
  source 1..110: mol_type = other RNA
aggattcggagtcccataactggttgagaatcgaaagattcttaataaggcatccttccgatgctgacttctcaccgtccgttttccaataggagcgggcggtatgtttt

SEQ ID NO: 2450 - RNA, 110 nt, synthetic construct
  source 1..110: mol_type = other RNA
ggattcggagtcccataactgagttgagaatcgaaagattcttaataaggcatccttccgatgctgacttctcaccgtccgttttccaataggagcgggcggtatgtttt

SEQ ID NO: 2451 - RNA, 110 nt, synthetic construct
  source 1..110: mol_type = other RNA
gtcccataactgacaggttttggttgagaatcgaaagattcttaataaggcatccttccgatgctgacttctcaccgtccgttttccaataggagcgggcggtatgtttt

SEQ ID NO: 2452 - RNA, 110 nt, synthetic construct
  source 1..110: mol_type = other RNA
ataactgacaggttttgaaagtgttgagaatcgaaagattcttaataaggcatccttccgatgctgacttctcaccgtccgttttccaataggagcgggcggtatgtttt

SEQ ID NO: 2453 - RNA, 110 nt, synthetic construct
  source 1..110: mol_type = other RNA
taactgacaggttttgaaagttgttgagaatcgaaagattcttaataaggcatccttccgatgctgacttctcaccgtccgttttccaataggagcgggcggtatgtttt

SEQ ID NO: 2454 - RNA, 110 nt, synthetic construct
  source 1..110: mol_type = other RNA
gtacttcctcactccaggtctggttgagaatcgaaagattcttaataaggcatccttccgatgctgacttctcaccgtccgttttccaataggagcgggcggtatgtttt

SEQ ID NO: 2455 - RNA, 110 nt, synthetic construct
  source 1..110: mol_type = other RNA
tcactccaggtctgcaagactggttgagaatcgaaagattcttaataaggcatccttccgatgctgacttctcaccgtccgttttccaataggagcgggcggtatgtttt

SEQ ID NO: 2456 - RNA, 110 nt, synthetic construct
  source 1..110: mol_type = other RNA
actccaggtctgcaagactgacgttgagaatcgaaagattcttaataaggcatccttccgatgctgacttctcaccgtccgttttccaataggagcgggcggtatgtttt

SEQ ID NO: 2457 - RNA, 110 nt, synthetic construct
  source 1..110: mol_type = other RNA
aagactgacagagcctgactccgttgagaatcgaaagattcttaataaggcatccttccgatgctgacttctcaccgtccgttttccaataggagcgggcggtatgtttt

SEQ ID NO: 2458 - RNA, 110 nt, synthetic construct
  source 1..110: mol_type = other RNA
ctccgctccttcttcaagccaagttgagaatcgaaagattcttaataaggcatccttccgatgctgacttctcaccgtccgttttccaataggagcgggcggtatgtttt

SEQ ID NO: 2459 - RNA, 110 nt, synthetic construct
  source 1..110: mol_type = other RNA
ccgctccttcttcaagccaaaagttgagaatcgaaagattcttaataaggcatccttccgatgctgacttctcaccgtccgttttccaataggagcgggcggtatgtttt

SEQ ID NO: 2460 - RNA, 110 nt, synthetic construct
  source 1..110: mol_type = other RNA
cccacctcgtcaagacggctgtgttgagaatcgaaagattcttaataaggcatccttccgatgctgacttctcaccgtccgttttccaataggagcgggcggtatgtttt

SEQ ID NO: 2461 - RNA, 110 nt, synthetic construct
  source 1..110: mol_type = other RNA
ccacctcgtcaagacggctgtcgttgagaatcgaaagattcttaataaggcatccttccgatgctgacttctcaccgtccgttttccaataggagcgggcggtatgtttt

SEQ ID NO: 2462 - RNA, 110 nt, synthetic construct
  source 1..110: mol_type = other RNA
cacctcgtcaagacggctgtctgttgagaatcgaaagattcttaataaggcatccttccgatgctgacttctcaccgtccgttttccaataggagcgggcggtatgtttt

SEQ ID NO: 2463 - RNA, 110 nt, synthetic construct
  source 1..110: mol_type = other RNA
aagacggctgtctggggtctgggttgagaatcgaaagattcttaataaggcatccttccgatgctgacttctcaccgtccgttttccaataggagcgggcggtatgtttt

SEQ ID NO: 2464 - RNA, 110 nt, synthetic construct
  source 1..110: mol_type = other RNA
tggccctgattcacaatcccacgttgagaatcgaaagattcttaataaggcatccttccgatgctgacttctcaccgtccgttttccaataggagcgggcggtatgtttt

SEQ ID NO: 2465 - RNA, 110 nt, synthetic construct
  source 1..110: mol_type = other RNA
ttcacaatcccacctggatctcgttgagaatcgaaagattcttaataaggcatccttccgatgctgacttctcaccgtccgttttccaataggagcgggcggtatgtttt

SEQ ID NO: 2466 - RNA, 110 nt, synthetic construct
  source 1..110: mol_type = other RNA
ctggatctcccagatttgtgaggttgagaatcgaaagattcttaataaggcatccttccgatgctgacttctcaccgtccgttttccaataggagcgggcggtatgtttt

SEQ ID NO: 2467 - RNA, 110 nt, synthetic construct
  source 1..110: mol_type = other RNA
cagatttgtgaggaaggttgctgttgagaatcgaaagattcttaataaggcatccttccgatgctgacttctcaccgtccgttttccaataggagcgggcggtatgtttt

SEQ ID NO: 2468 - RNA, 110 nt, synthetic construct
  source 1..110: mol_type = other RNA
gtgaggaaggttgctggagagcgttgagaatcgaaagattcttaataaggcatccttccgatgctgacttctcaccgtccgttttccaataggagcgggcggtatgtttt

SEQ ID NO: 2469 - RNA, 110 nt, synthetic construct
  source 1..110: mol_type = other RNA
taagcactgctgccgcacccacgttgagaatcgaaagattcttaataaggcatccttccgatgctgacttctcaccgtccgttttccaataggagcgggcggtatgtttt

SEQ ID NO: 2470 - RNA, 110 nt, synthetic construct
  source 1..110: mol_type = other RNA
gctgaccattcacaaaaaacgggttgagaatcgaaagattcttaataaggcatccttccgatgctgacttctcaccgtccgttttccaataggagcgggcggtatgtttt

SEQ ID NO: 2471 - RNA, 110 nt, synthetic construct
  source 1..110: mol_type = other RNA
ccattcacaaaaaacggcaggggttgagaatcgaaagattcttaataaggcatccttccgatgctgacttctcaccgtccgttttccaataggagcgggcggtatgtttt

SEQ ID NO: 2472 - RNA, 110 nt, synthetic construct
  source 1..110: mol_type = other RNA
cattcacaaaaaacggcagggggttgagaatcgaaagattcttaataaggcatccttccgatgctgacttctcaccgtccgttttccaataggagcgggcggtatgtttt

SEQ ID NO: 2473 - RNA, 110 nt, synthetic construct
  source 1..110: mol_type = other RNA
attcacaaaaaacggcaggggcgttgagaatcgaaagattcttaataaggcatccttccgatgctgacttctcaccgtccgttttccaataggagcgggcggtatgtttt

SEQ ID NO: 2474 - RNA, 110 nt, synthetic construct
  source 1..110: mol_type = other RNA
aacggcaggggcggggcttctcgttgagaatcgaaagattcttaataaggcatccttccgatgctgacttctcaccgtccgttttccaataggagcgggcggtatgtttt

SEQ ID NO: 2475 - RNA, 110 nt, synthetic construct
  source 1..110: mol_type = other RNA
gggcggggcttctcctggatctgttgagaatcgaaagattcttaataaggcatccttccgatgctgacttctcaccgtccgttttccaataggagcgggcggtatgtttt

SEQ ID NO: 2476 - RNA, 110 nt, synthetic construct
  source 1..110: mol_type = other RNA
atctgaagacccctcccccatggttgagaatcgaaagattcttaataaggcatccttccgatgctgacttctcaccgtccgttttccaataggagcgggcggtatgtttt

SEQ ID NO: 2477 - RNA, 110 nt, synthetic construct
  source 1..110: mol_type = other RNA
agactcccctgtaaaatctcttgttgagaatcgaaagattcttaataaggcatccttccgatgctgacttctcaccgtccgttttccaataggagcgggcggtatgtttt

SEQ ID NO: 2478 - RNA, 110 nt, synthetic construct
  source 1..110: mol_type = other RNA
gttttttgttttttttttttttgttgagaatcgaaagattcttaataaggcatccttccgatgctgacttctcaccgtccgttttccaataggagcgggcggtatgtttt

SEQ ID NO: 2479 - RNA, 110 nt, synthetic construct
  source 1..110: mol_type = other RNA
ttttttgttttttttttttttggttgagaatcgaaagattcttaataaggcatccttccgatgctgacttctcaccgtccgttttccaataggagcgggcggtatgtttt

SEQ ID NO: 2480 - RNA, 110 nt, synthetic construct
  source 1..110: mol_type = other RNA
tttttttgcgggtttattttttgttgagaatcgaaagattcttaataaggcatccttccgatgctgacttctcaccgtccgttttccaataggagcgggcggtatgtttt

SEQ ID NO: 2481 - RNA, 110 nt, synthetic construct
  source 1..110: mol_type = other RNA
aaatgcatattactctttcatcgttgagaatcgaaagattcttaataaggcatccttccgatgctgacttctcaccgtccgttttccaataggagcgggcggtatgtttt

SEQ ID NO: 2482 - RNA, 110 nt, synthetic construct
  source 1..110: mol_type = other RNA
ggtgtagaaattatctcattgtgttgagaatcgaaagattcttaataaggcatccttccgatgctgacttctcaccgtccgttttccaataggagcgggcggtatgtttt

SEQ ID NO: 2483 - RNA, 110 nt, synthetic construct
  source 1..110: mol_type = other RNA
acctttaatgatgtcatggacagttgagaatcgaaagattcttaataaggcatccttccgatgctgacttctcaccgtccgttttccaataggagcgggcggtatgtttt

SEQ ID NO: 2484 - RNA, 110 nt, synthetic construct
  source 1..110: mol_type = other RNA
ggacagcagaataatatacaatgttgagaatcgaaagattcttaataaggcatccttccgatgctgacttctcaccgtccgttttccaataggagcgggcggtatgtttt

SEQ ID NO: 2485 - RNA, 110 nt, synthetic construct
  source 1..110: mol_type = other RNA
tggctcaatacacacagtagcagttgagaatcgaaagattcttaataaggcatccttccgatgctgacttctcaccgtccgttttccaataggagcgggcggtatgtttt

SEQ ID NO: 2486 - DNA, 22 bp, Homo sapiens
  source 1..22: mol_type = genomic DNA
agtcctcttggcccacagacat

SEQ ID NO: 2487 - DNA, 22 bp, Homo sapiens
  source 1..22: mol_type = genomic DNA
ttggcccacagacatccagaac

SEQ ID NO: 2488 - DNA, 22 bp, Homo sapiens
  source 1..22: mol_type = genomic DNA
agaacctgctgtgtaccagtta

SEQ ID NO: 2489 - DNA, 22 bp, Homo sapiens
  source 1..22: mol_type = genomic DNA
ctgtgtaccagttaaaagatcc

SEQ ID NO: 2490 - DNA, 22 bp, Homo sapiens
  source 1..22: mol_type = genomic DNA
accagttaaaagatcctcggtc

SEQ ID NO: 2491 - DNA, 22 bp, Homo sapiens
  source 1..22: mol_type = genomic DNA
ttaaaagatcctcggtctcagg

SEQ ID NO: 2492 - DNA, 22 bp, Homo sapiens
  source 1..22: mol_type = genomic DNA
ccaaatcaatgtgccgaaaacc

SEQ ID NO: 2493 - DNA, 22 bp, Homo sapiens
  source 1..22: mol_type = genomic DNA
aatgtgccgaaaaccatggaat

SEQ ID NO: 2494 - DNA, 22 bp, Homo sapiens
  source 1..22: mol_type = genomic DNA
aactgtgctggacatgaaagct

SEQ ID NO: 2495 - DNA, 22 bp, Homo sapiens
  source 1..22: mol_type = genomic DNA
tggacatgaaagctatggattc

SEQ ID NO: 2496 - DNA, 22 bp, Homo sapiens
  source 1..22: mol_type = genomic DNA
aaagctatggattccaagagca

SEQ ID NO: 2497 - DNA, 22 bp, Homo sapiens
  source 1..22: mol_type = genomic DNA
aagctatggattccaagagcaa

SEQ ID NO: 2498 - DNA, 22 bp, Homo sapiens
  source 1..22: mol_type = genomic DNA
ccaagagcaatggggccattgc

SEQ ID NO: 2499 - DNA, 22 bp, Homo sapiens
  source 1..22: mol_type = genomic DNA
gccattgcctggagcaaccaga

SEQ ID NO: 2500 - DNA, 22 bp, Homo sapiens
  source 1..22: mol_type = genomic DNA
tcacctgccaagatatcttcaa

SEQ ID NO: 2501 - DNA, 22 bp, Homo sapiens
  source 1..22: mol_type = genomic DNA
aaagagaccaacgccacctacc

SEQ ID NO: 2502 - DNA, 22 bp, Homo sapiens
  source 1..22: mol_type = genomic DNA
ccacctaccccagttcaggtga

SEQ ID NO: 2503 - DNA, 22 bp, Homo sapiens
  source 1..22: mol_type = genomic DNA
tctggggcaccactcacctgaa

SEQ ID NO: 2504 - DNA, 22 bp, Homo sapiens
  source 1..22: mol_type = genomic DNA
ccactcacctgaactggggtag

SEQ ID NO: 2505 - DNA, 22 bp, Homo sapiens
  source 1..22: mol_type = genomic DNA
acctgaactggggtaggtggcg

SEQ ID NO: 2506 - DNA, 22 bp, Homo sapiens
  source 1..22: mol_type = genomic DNA
ctttgaagatatcttggcaggt

SEQ ID NO: 2507 - DNA, 22 bp, Homo sapiens
  source 1..22: mol_type = genomic DNA
gcttgtctggttgctccaggca

SEQ ID NO: 2508 - DNA, 22 bp, Homo sapiens
  source 1..22: mol_type = genomic DNA
ccaggcaatggccccattgctc

SEQ ID NO: 2509 - DNA, 22 bp, Homo sapiens
  source 1..22: mol_type = genomic DNA
ggccccattgctcttggaatcc

SEQ ID NO: 2510 - DNA, 22 bp, Homo sapiens
  source 1..22: mol_type = genomic DNA
ttggaatccatagctttcatgt

SEQ ID NO: 2511 - DNA, 22 bp, Homo sapiens
  source 1..22: mol_type = genomic DNA
atccatagctttcatgtccagc

SEQ ID NO: 2512 - DNA, 22 bp, Homo sapiens
  source 1..22: mol_type = genomic DNA
agttttgtcagtgatgaacgtt

SEQ ID NO: 2513 - DNA, 22 bp, Homo sapiens
  source 1..22: mol_type = genomic DNA
agtgatgaacgttccagattcc

SEQ ID NO: 2514 - DNA, 22 bp, Homo sapiens
  source 1..22: mol_type = genomic DNA
aacgttccagattccatggttt

SEQ ID NO: 2515 - DNA, 22 bp, Homo sapiens
  source 1..22: mol_type = genomic DNA
catggttttcggcacattgatt

SEQ ID NO: 2516 - DNA, 22 bp, Homo sapiens
  source 1..22: mol_type = genomic DNA
gagtcaaagtcggtgaacaggc

SEQ ID NO: 2517 - DNA, 22 bp, Homo sapiens
  source 1..22: mol_type = genomic DNA
gtcaaagtcggtgaacaggcag

SEQ ID NO: 2518 - DNA, 22 bp, Homo sapiens
  source 1..22: mol_type = genomic DNA
gaacaggcagagggtgctgtcc

SEQ ID NO: 2519 - DNA, 22 bp, Homo sapiens
  source 1..22: mol_type = genomic DNA
gcagagggtgctgtcctgagac

SEQ ID NO: 2520 - DNA, 22 bp, Homo sapiens
  source 1..22: mol_type = genomic DNA
cagagggtgctgtcctgagacc

SEQ ID NO: 2521 - DNA, 22 bp, Homo sapiens
  source 1..22: mol_type = genomic DNA
cctgagaccgaggatcttttaa

SEQ ID NO: 2522 - DNA, 22 bp, Homo sapiens
  source 1..22: mol_type = genomic DNA
aggatcttttaactggtacaca

SEQ ID NO: 2523 - DNA, 22 bp, Homo sapiens
  source 1..22: mol_type = genomic DNA
ggatcttttaactggtacacag

SEQ ID NO: 2524 - DNA, 22 bp, Homo sapiens
  source 1..22: mol_type = genomic DNA
tttaactggtacacagcaggtt

SEQ ID NO: 2525 - DNA, 22 bp, Homo sapiens
  source 1..22: mol_type = genomic DNA
ttaactggtacacagcaggttc

SEQ ID NO: 2526 - DNA, 22 bp, Homo sapiens
  source 1..22: mol_type = genomic DNA
aggttctgggttctggatgtct

SEQ ID NO: 2527 - DNA, 22 bp, Homo sapiens
  source 1..22: mol_type = genomic DNA
tgtgatgccacgttgactgaga

SEQ ID NO: 2528 - DNA, 22 bp, Homo sapiens
  source 1..22: mol_type = genomic DNA
agacccttctcttacctgtttc

SEQ ID NO: 2529 - DNA, 22 bp, Homo sapiens
  source 1..22: mol_type = genomic DNA
ttcaaagcttttctcagtcaac

SEQ ID NO: 2530 - DNA, 22 bp, Homo sapiens
  source 1..22: mol_type = genomic DNA
ttctcagtcaacgtggcatcac

SEQ ID NO: 2531 - DNA, 22 bp, Homo sapiens
  source 1..22: mol_type = genomic DNA
aaactttcaaaacctgtcagtt

SEQ ID NO: 2532 - DNA, 22 bp, Homo sapiens
  source 1..22: mol_type = genomic DNA
aactttcaaaacctgtcagtta

SEQ ID NO: 2533 - DNA, 22 bp, Homo sapiens
  source 1..22: mol_type = genomic DNA
cgaatcctcctgctgaaagtag

SEQ ID NO: 2534 - DNA, 22 bp, Homo sapiens
  source 1..22: mol_type = genomic DNA
ggatttaacctgctcatgacgc

SEQ ID NO: 2535 - DNA, 22 bp, Homo sapiens
  source 1..22: mol_type = genomic DNA
acctgctcatgacgctgaggct

SEQ ID NO: 2536 - DNA, 22 bp, Homo sapiens
  source 1..22: mol_type = genomic DNA
gctgtggtccagttgaggtaag

SEQ ID NO: 2537 - DNA, 22 bp, Homo sapiens
  source 1..22: mol_type = genomic DNA
ctttcatgccttcttacctcaa

SEQ ID NO: 2538 - DNA, 22 bp, Homo sapiens
  source 1..22: mol_type = genomic DNA
gccttcttacctcaactggacc

SEQ ID NO: 2539 - DNA, 22 bp, Homo sapiens
  source 1..22: mol_type = genomic DNA
ttacctcaactggaccacagcc

SEQ ID NO: 2540 - DNA, 22 bp, Homo sapiens
  source 1..22: mol_type = genomic DNA
gaccacagcctcagcgtcatga

SEQ ID NO: 2541 - DNA, 22 bp, Homo sapiens
  source 1..22: mol_type = genomic DNA
ttaaatccggctactttcagca

SEQ ID NO: 2542 - DNA, 22 bp, Homo sapiens
  source 1..22: mol_type = genomic DNA
taaatccggctactttcagcag

SEQ ID NO: 2543 - DNA, 22 bp, Homo sapiens
  source 1..22: mol_type = genomic DNA
cggctactttcagcaggaggat

SEQ ID NO: 2544 - DNA, 22 bp, Homo sapiens
  source 1..22: mol_type = genomic DNA
gctactttcagcaggaggattc

SEQ ID NO: 2545 - DNA, 22 bp, Homo sapiens
  source 1..22: mol_type = genomic DNA
aggattcggagtcccataactg

SEQ ID NO: 2546 - DNA, 22 bp, Homo sapiens
  source 1..22: mol_type = genomic DNA
ggattcggagtcccataactga

SEQ ID NO: 2547 - DNA, 22 bp, Homo sapiens
  source 1..22: mol_type = genomic DNA
gtcccataactgacaggttttg

SEQ ID NO: 2548 - DNA, 22 bp, Homo sapiens
  source 1..22: mol_type = genomic DNA
ataactgacaggttttgaaagt

SEQ ID NO: 2549 - DNA, 22 bp, Homo sapiens
  source 1..22: mol_type = genomic DNA
taactgacaggttttgaaagtt

SEQ ID NO: 2550 - DNA, 22 bp, Homo sapiens
  source 1..22: mol_type = genomic DNA
gtacttcctcactccaggtctg

SEQ ID NO: 2551 - DNA, 22 bp, Homo sapiens
  source 1..22: mol_type = genomic DNA
tcactccaggtctgcaagactg

SEQ ID NO: 2552 - DNA, 22 bp, Homo sapiens
  source 1..22: mol_type = genomic DNA
actccaggtctgcaagactgac

SEQ ID NO: 2553 - DNA, 22 bp, Homo sapiens
  source 1..22: mol_type = genomic DNA
aagactgacagagcctgactcc

SEQ ID NO: 2554 - DNA, 22 bp, Homo sapiens
  source 1..22: mol_type = genomic DNA
ctccgctccttcttcaagccaa

SEQ ID NO: 2555 - DNA, 22 bp, Homo sapiens
  source 1..22: mol_type = genomic DNA
ccgctccttcttcaagccaaaa

SEQ ID NO: 2556 - DNA, 22 bp, Homo sapiens
  source 1..22: mol_type = genomic DNA
cccacctcgtcaagacggctgt

SEQ ID NO: 2557 - DNA, 22 bp, Homo sapiens
  source 1..22: mol_type = genomic DNA
ccacctcgtcaagacggctgtc

SEQ ID NO: 2558 - DNA, 22 bp, Homo sapiens
  source 1..22: mol_type = genomic DNA
cacctcgtcaagacggctgtct

SEQ ID NO: 2559 - DNA, 22 bp, Homo sapiens
  source 1..22: mol_type = genomic DNA
aagacggctgtctggggtctgg

SEQ ID NO: 2560 - DNA, 22 bp, Homo sapiens
  source 1..22: mol_type = genomic DNA
tggccctgattcacaatcccac

SEQ ID NO: 2561 - DNA, 22 bp, Homo sapiens
  source 1..22: mol_type = genomic DNA
ttcacaatcccacctggatctc

SEQ ID NO: 2562 - DNA, 22 bp, Homo sapiens
  source 1..22: mol_type = genomic DNA
ctggatctcccagatttgtgag

SEQ ID NO: 2563 - DNA, 22 bp, Homo sapiens
  source 1..22: mol_type = genomic DNA
cagatttgtgaggaaggttgct

SEQ ID NO: 2564 - DNA, 22 bp, Homo sapiens
  source 1..22: mol_type = genomic DNA
gtgaggaaggttgctggagagc

SEQ ID NO: 2565 - DNA, 22 bp, Homo sapiens
  source 1..22: mol_type = genomic DNA
taagcactgctgccgcacccac

SEQ ID NO: 2566 - DNA, 22 bp, Homo sapiens
  source 1..22: mol_type = genomic DNA
gctgaccattcacaaaaaacgg

SEQ ID NO: 2567 - DNA, 22 bp, Homo sapiens
  source 1..22: mol_type = genomic DNA
ccattcacaaaaaacggcaggg

SEQ ID NO: 2568 - DNA, 22 bp, Homo sapiens
  source 1..22: mol_type = genomic DNA
cattcacaaaaaacggcagggg

SEQ ID NO: 2569 - DNA, 22 bp, Homo sapiens
  source 1..22: mol_type = genomic DNA
attcacaaaaaacggcaggggc

SEQ ID NO: 2570 - DNA, 22 bp, Homo sapiens
  source 1..22: mol_type = genomic DNA
aacggcaggggcggggcttctc

SEQ ID NO: 2571 - DNA, 22 bp, Homo sapiens
  source 1..22: mol_type = genomic DNA
gggcggggcttctcctggatct

SEQ ID NO: 2572 - DNA, 22 bp, Homo sapiens
  source 1..22: mol_type = genomic DNA
atctgaagacccctcccccatg

SEQ ID NO: 2573 - DNA, 22 bp, Homo sapiens
  source 1..22: mol_type = genomic DNA
agactcccctgtaaaatctctt

SEQ ID NO: 2574 - DNA, 22 bp, Homo sapiens
  source 1..22: mol_type = genomic DNA
gttttttgtttttttttttttt

SEQ ID NO: 2575 - DNA, 22 bp, Homo sapiens
  source 1..22: mol_type = genomic DNA
ttttttgttttttttttttttg

SEQ ID NO: 2576 - DNA, 22 bp, Homo sapiens
  source 1..22: mol_type = genomic DNA
tttttttgcgggtttatttttt

SEQ ID NO: 2577 - DNA, 22 bp, Homo sapiens
  source 1..22: mol_type = genomic DNA
aaatgcatattactctttcatc

SEQ ID NO: 2578 - DNA, 22 bp, Homo sapiens
  source 1..22: mol_type = genomic DNA
ggtgtagaaattatctcattgt

SEQ ID NO: 2579 - DNA, 22 bp, Homo sapiens
  source 1..22: mol_type = genomic DNA
acctttaatgatgtcatggaca

SEQ ID NO: 2580 - DNA, 22 bp, Homo sapiens
  source 1..22: mol_type = genomic DNA
ggacagcagaataatatacaat

SEQ ID NO: 2581 - DNA, 22 bp, Homo sapiens
  source 1..22: mol_type = genomic DNA
tggctcaatacacacagtagca

SEQ ID NO: 2582 - RNA, 110 nt, synthetic construct
  source 1..110: mol_type = other RNA
ggctcaatacacacagtagcaggttgagaatcgaaagattcttaataaggcatccttccgatgctgacttctcaccgtccgttttccaataggagcgggcggtatgtttt

SEQ ID NO: 2583 - RNA, 110 nt, synthetic construct
  source 1..110: mol_type = other RNA
gctcaatacacacagtagcagggttgagaatcgaaagattcttaataaggcatccttccgatgctgacttctcaccgtccgttttccaataggagcgggcggtatgtttt

SEQ ID NO: 2584 - RNA, 110 nt, synthetic construct
  source 1..110: mol_type = other RNA
agataatttctacaccttgatggttgagaatcgaaagattcttaataaggcatccttccgatgctgacttctcaccgtccgttttccaataggagcgggcggtatgtttt

SEQ ID NO: 2585 - RNA, 110 nt, synthetic construct
  source 1..110: mol_type = other RNA
attttttttacaacattctccagttgagaatcgaaagattcttaataaggcatccttccgatgctgacttctcaccgtccgttttccaataggagcgggcggtatgtttt

SEQ ID NO: 2586 - RNA, 110 nt, synthetic construct
  source 1..110: mol_type = other RNA
acattctccaagagattttacagttgagaatcgaaagattcttaataaggcatccttccgatgctgacttctcaccgtccgttttccaataggagcgggcggtatgtttt

SEQ ID NO: 2587 - RNA, 110 nt, synthetic construct
  source 1..110: mol_type = other RNA
attctccaagagattttacagggttgagaatcgaaagattcttaataaggcatccttccgatgctgacttctcaccgtccgttttccaataggagcgggcggtatgtttt

SEQ ID NO: 2588 - RNA, 110 nt, synthetic construct
  source 1..110: mol_type = other RNA
tacaggggagtctgccatgggggttgagaatcgaaagattcttaataaggcatccttccgatgctgacttctcaccgtccgttttccaataggagcgggcggtatgtttt

SEQ ID NO: 2589 - RNA, 110 nt, synthetic construct
  source 1..110: mol_type = other RNA
acaggggagtctgccatggggggttgagaatcgaaagattcttaataaggcatccttccgatgctgacttctcaccgtccgttttccaataggagcgggcggtatgtttt

SEQ ID NO: 2590 - RNA, 110 nt, synthetic construct
  source 1..110: mol_type = other RNA
caggggagtctgccatgggggagttgagaatcgaaagattcttaataaggcatccttccgatgctgacttctcaccgtccgttttccaataggagcgggcggtatgtttt

SEQ ID NO: 2591 - RNA, 110 nt, synthetic construct
  source 1..110: mol_type = other RNA
gtctgccatgggggaggggtctgttgagaatcgaaagattcttaataaggcatccttccgatgctgacttctcaccgtccgttttccaataggagcgggcggtatgtttt

SEQ ID NO: 2592 - RNA, 110 nt, synthetic construct
  source 1..110: mol_type = other RNA
ggaggggtcttcagatccaggagttgagaatcgaaagattcttaataaggcatccttccgatgctgacttctcaccgtccgttttccaataggagcgggcggtatgtttt

SEQ ID NO: 2593 - RNA, 110 nt, synthetic construct
  source 1..110: mol_type = other RNA
ttgtgaatggtcagcagcagtggttgagaatcgaaagattcttaataaggcatccttccgatgctgacttctcaccgtccgttttccaataggagcgggcggtatgtttt

SEQ ID NO: 2594 - RNA, 110 nt, synthetic construct
  source 1..110: mol_type = other RNA
cagcagcagtgagggagctgaggttgagaatcgaaagattcttaataaggcatccttccgatgctgacttctcaccgtccgttttccaataggagcgggcggtatgtttt

SEQ ID NO: 2595 - RNA, 110 nt, synthetic construct
  source 1..110: mol_type = other RNA
agggagctgagtgggtgcggcagttgagaatcgaaagattcttaataaggcatccttccgatgctgacttctcaccgtccgttttccaataggagcgggcggtatgtttt

SEQ ID NO: 2596 - RNA, 110 nt, synthetic construct
  source 1..110: mol_type = other RNA
tgagtgggtgcggcagcagtgcgttgagaatcgaaagattcttaataaggcatccttccgatgctgacttctcaccgtccgttttccaataggagcgggcggtatgtttt

SEQ ID NO: 2597 - RNA, 110 nt, synthetic construct
  source 1..110: mol_type = other RNA
agcaaccttcctcacaaatctggttgagaatcgaaagattcttaataaggcatccttccgatgctgacttctcaccgtccgttttccaataggagcgggcggtatgtttt

SEQ ID NO: 2598 - RNA, 110 nt, synthetic construct
  source 1..110: mol_type = other RNA
ctcacaaatctgggagatccaggttgagaatcgaaagattcttaataaggcatccttccgatgctgacttctcaccgtccgttttccaataggagcgggcggtatgtttt

SEQ ID NO: 2599 - RNA, 110 nt, synthetic construct
  source 1..110: mol_type = other RNA
tcacaaatctgggagatccagggttgagaatcgaaagattcttaataaggcatccttccgatgctgacttctcaccgtccgttttccaataggagcgggcggtatgtttt

SEQ ID NO: 2600 - RNA, 110 nt, synthetic construct
  source 1..110: mol_type = other RNA
gagatccaggtgggattgtgaagttgagaatcgaaagattcttaataaggcatccttccgatgctgacttctcaccgtccgttttccaataggagcgggcggtatgtttt

SEQ ID NO: 2601 - RNA, 110 nt, synthetic construct
  source 1..110: mol_type = other RNA
agatccaggtgggattgtgaatgttgagaatcgaaagattcttaataaggcatccttccgatgctgacttctcaccgtccgttttccaataggagcgggcggtatgtttt

SEQ ID NO: 2602 - RNA, 110 nt, synthetic construct
  source 1..110: mol_type = other RNA
tgggattgtgaatcagggccaagttgagaatcgaaagattcttaataaggcatccttccgatgctgacttctcaccgtccgttttccaataggagcgggcggtatgtttt

SEQ ID NO: 2603 - RNA, 110 nt, synthetic construct
  source 1..110: mol_type = other RNA
agacagccgtcttgacgaggtggttgagaatcgaaagattcttaataaggcatccttccgatgctgacttctcaccgtccgttttccaataggagcgggcggtatgtttt

SEQ ID NO: 2604 - RNA, 110 nt, synthetic construct
  source 1..110: mol_type = other RNA
gacagccgtcttgacgaggtgggttgagaatcgaaagattcttaataaggcatccttccgatgctgacttctcaccgtccgttttccaataggagcgggcggtatgtttt

SEQ ID NO: 2605 - RNA, 110 nt, synthetic construct
  source 1..110: mol_type = other RNA
acagccgtcttgacgaggtggggttgagaatcgaaagattcttaataaggcatccttccgatgctgacttctcaccgtccgttttccaataggagcgggcggtatgtttt

SEQ ID NO: 2606 - RNA, 110 nt, synthetic construct
  source 1..110: mol_type = other RNA
tgacgaggtgggagggctccttgttgagaatcgaaagattcttaataaggcatccttccgatgctgacttctcaccgtccgttttccaataggagcgggcggtatgtttt

SEQ ID NO: 2607 - RNA, 110 nt, synthetic construct
  source 1..110: mol_type = other RNA
gagggctccttttggcttgaaggttgagaatcgaaagattcttaataaggcatccttccgatgctgacttctcaccgtccgttttccaataggagcgggcggtatgtttt

SEQ ID NO: 2608 - RNA, 110 nt, synthetic construct
  source 1..110: mol_type = other RNA
cttttggcttgaagaaggagcggttgagaatcgaaagattcttaataaggcatccttccgatgctgacttctcaccgtccgttttccaataggagcgggcggtatgtttt

SEQ ID NO: 2609 - RNA, 110 nt, synthetic construct
  source 1..110: mol_type = other RNA
tgaagaaggagcggaggggtgagttgagaatcgaaagattcttaataaggcatccttccgatgctgacttctcaccgtccgttttccaataggagcgggcggtatgtttt

SEQ ID NO: 2610 - RNA, 110 nt, synthetic construct
  source 1..110: mol_type = other RNA
aaggagcggaggggtgaggagggttgagaatcgaaagattcttaataaggcatccttccgatgctgacttctcaccgtccgttttccaataggagcgggcggtatgtttt

SEQ ID NO: 2611 - RNA, 110 nt, synthetic construct
  source 1..110: mol_type = other RNA
ggagcggaggggtgaggaggatgttgagaatcgaaagattcttaataaggcatccttccgatgctgacttctcaccgtccgttttccaataggagcgggcggtatgtttt

SEQ ID NO: 2612 - RNA, 110 nt, synthetic construct
  source 1..110: mol_type = other RNA
gaggggtgaggaggatggagctgttgagaatcgaaagattcttaataaggcatccttccgatgctgacttctcaccgtccgttttccaataggagcgggcggtatgtttt

SEQ ID NO: 2613 - RNA, 110 nt, synthetic construct
  source 1..110: mol_type = other RNA
tgaggaggatggagcttgggaggttgagaatcgaaagattcttaataaggcatccttccgatgctgacttctcaccgtccgttttccaataggagcgggcggtatgtttt

SEQ ID NO: 2614 - RNA, 110 nt, synthetic construct
  source 1..110: mol_type = other RNA
gaggaggatggagcttgggagtgttgagaatcgaaagattcttaataaggcatccttccgatgctgacttctcaccgtccgttttccaataggagcgggcggtatgtttt

SEQ ID NO: 2615 - RNA, 110 nt, synthetic construct
  source 1..110: mol_type = other RNA
ggagcttgggagtcaggctctggttgagaatcgaaagattcttaataaggcatccttccgatgctgacttctcaccgtccgttttccaataggagcgggcggtatgtttt

SEQ ID NO: 2616 - RNA, 110 nt, synthetic construct
  source 1..110: mol_type = other RNA
ggagtcaggctctgtcagtcttgttgagaatcgaaagattcttaataaggcatccttccgatgctgacttctcaccgtccgttttccaataggagcgggcggtatgtttt

SEQ ID NO: 2617 - RNA, 110 nt, synthetic construct
  source 1..110: mol_type = other RNA
aggctctgtcagtcttgcagacgttgagaatcgaaagattcttaataaggcatccttccgatgctgacttctcaccgtccgttttccaataggagcgggcggtatgtttt

SEQ ID NO: 2618 - DNA, 22 bp, Homo sapiens
  source 1..22: mol_type = genomic DNA
ggctcaatacacacagtagcag

SEQ ID NO: 2619 - DNA, 22 bp, Homo sapiens
  source 1..22: mol_type = genomic DNA
gctcaatacacacagtagcagg

SEQ ID NO: 2620 - DNA, 22 bp, Homo sapiens
  source 1..22: mol_type = genomic DNA
agataatttctacaccttgatg

SEQ ID NO: 2621 - DNA, 22 bp, Homo sapiens
  source 1..22: mol_type = genomic DNA
attttttttacaacattctcca

SEQ ID NO: 2622 - DNA, 22 bp, Homo sapiens
  source 1..22: mol_type = genomic DNA
acattctccaagagattttaca

SEQ ID NO: 2623 - DNA, 22 bp, Homo sapiens
  source 1..22: mol_type = genomic DNA
attctccaagagattttacagg

SEQ ID NO: 2624 - DNA, 22 bp, Homo sapiens
  source 1..22: mol_type = genomic DNA
tacaggggagtctgccatgggg

SEQ ID NO: 2625 - DNA, 22 bp, Homo sapiens
  source 1..22: mol_type = genomic DNA
acaggggagtctgccatggggg

SEQ ID NO: 2626 - DNA, 22 bp, Homo sapiens
  source 1..22: mol_type = genomic DNA
caggggagtctgccatggggga

SEQ ID NO: 2627 - DNA, 22 bp, Homo sapiens
  source 1..22: mol_type = genomic DNA
gtctgccatgggggaggggtct

SEQ ID NO: 2628 - DNA, 22 bp, Homo sapiens
  source 1..22: mol_type = genomic DNA
ggaggggtcttcagatccagga

SEQ ID NO: 2629 - DNA, 22 bp, Homo sapiens
  source 1..22: mol_type = genomic DNA
ttgtgaatggtcagcagcagtg

SEQ ID NO: 2630 - DNA, 22 bp, Homo sapiens
  source 1..22: mol_type = genomic DNA
cagcagcagtgagggagctgag

SEQ ID NO: 2631 - DNA, 22 bp, Homo sapiens
  source 1..22: mol_type = genomic DNA
agggagctgagtgggtgcggca

SEQ ID NO: 2632 - DNA, 22 bp, Homo sapiens
  source 1..22: mol_type = genomic DNA
tgagtgggtgcggcagcagtgc

SEQ ID NO: 2633 - DNA, 22 bp, Homo sapiens
  source 1..22: mol_type = genomic DNA
agcaaccttcctcacaaatctg

SEQ ID NO: 2634 - DNA, 22 bp, Homo sapiens
  source 1..22: mol_type = genomic DNA
ctcacaaatctgggagatccag

SEQ ID NO: 2635 - DNA, 22 bp, Homo sapiens
  source 1..22: mol_type = genomic DNA
tcacaaatctgggagatccagg

SEQ ID NO: 2636 - DNA, 22 bp, Homo sapiens
  source 1..22: mol_type = genomic DNA
gagatccaggtgggattgtgaa

SEQ ID NO: 2637 - DNA, 22 bp, Homo sapiens
  source 1..22: mol_type = genomic DNA
agatccaggtgggattgtgaat

SEQ ID NO: 2638 - DNA, 22 bp, Homo sapiens
  source 1..22: mol_type = genomic DNA
tgggattgtgaatcagggccaa

SEQ ID NO: 2639 - DNA, 22 bp, Homo sapiens
  source 1..22: mol_type = genomic DNA
agacagccgtcttgacgaggtg

SEQ ID NO: 2640 - DNA, 22 bp, Homo sapiens
  source 1..22: mol_type = genomic DNA
gacagccgtcttgacgaggtgg

SEQ ID NO: 2641 - DNA, 22 bp, Homo sapiens
  source 1..22: mol_type = genomic DNA
acagccgtcttgacgaggtggg

SEQ ID NO: 2642 - DNA, 22 bp, Homo sapiens
  source 1..22: mol_type = genomic DNA
tgacgaggtgggagggctcctt

SEQ ID NO: 2643 - DNA, 22 bp, Homo sapiens
  source 1..22: mol_type = genomic DNA
gagggctccttttggcttgaag

SEQ ID NO: 2644 - DNA, 22 bp, Homo sapiens
  source 1..22: mol_type = genomic DNA
cttttggcttgaagaaggagcg

SEQ ID NO: 2645 - DNA, 22 bp, Homo sapiens
  source 1..22: mol_type = genomic DNA
tgaagaaggagcggaggggtga

SEQ ID NO: 2646 - DNA, 22 bp, Homo sapiens
  source 1..22: mol_type = genomic DNA
aaggagcggaggggtgaggagg

SEQ ID NO: 2647 - DNA, 22 bp, Homo sapiens
  source 1..22: mol_type = genomic DNA
ggagcggaggggtgaggaggat

SEQ ID NO: 2648 - DNA, 22 bp, Homo sapiens
  source 1..22: mol_type = genomic DNA
gaggggtgaggaggatggagct

SEQ ID NO: 2649 - DNA, 22 bp, Homo sapiens
  source 1..22: mol_type = genomic DNA
tgaggaggatggagcttgggag

SEQ ID NO: 2650 - DNA, 22 bp, Homo sapiens
  source 1..22: mol_type = genomic DNA
gaggaggatggagcttgggagt

SEQ ID NO: 2651 - DNA, 22 bp, Homo sapiens
  source 1..22: mol_type = genomic DNA
ggagcttgggagtcaggctctg

SEQ ID NO: 2652 - DNA, 22 bp, Homo sapiens
  source 1..22: mol_type = genomic DNA
ggagtcaggctctgtcagtctt

SEQ ID NO: 2653 - DNA, 22 bp, Homo sapiens
  source 1..22: mol_type = genomic DNA
aggctctgtcagtcttgcagac

SEQ ID NO: 2654-2841 - skipped (188 entries)

SEQ ID NO: 2842 - protein, 1290 aa, synthetic construct
MFNNFIKKYSLQKTLRFELKPVGETADYIEDFKSEYLKDTVLKDEQRAKDYQEIKTLIDDYHREYIEECLREPVDKKTGEILDFTQDLEDAFSYYQKLKENPTENRVGWEKEQESLRKKLVTSFVGNDGLFKKEFITRDLPEWLQKKGLWGEYKDTVENFKKFTTYFSGFHENRKNMYTAEAQSTAIANRLMNDNLPKFFNNYLAYQTIKEKHPDLVFRLDDALLQAAGVEHLDEAFQPRYFSRLFAQSGITAFNELIGGRTTENGEKIQGLNEQINLYRQQNPEKAKGFPRFMPLFKQILSDRETHSFLPDAFENDKELLQALRDYVDAATSEEGMISQLNKAMNQFVTADLKRVYIKSAALTSLSQELFHFFGVISDAIAWYAEKRLSPKKAQESFLKQEVYAIEELNQAVVGYIDQLEDQSELQQLLVDLPDPQKPVSSFILTHWQKSQEPLQAVIAKVEPLFELEELSKNKRAPKHDKDQGGEGFQQVDAIKNMLDAFMEVSHAIKPLYLVKGRKAIDMPDVDTGFYADFAEAYSAYEQVTVSLYNKTRNHLSKKPFKADKFKINFDNPELLAGWPETREKATSSIILQKGGLYFLGILNHKTKKSFRNDVEPNNDNFYLKMFYNQVADPGKDVQNLLVIDGKTVKKNGRKNSDGINEVLEELKNTYLPENINRVRVNKTYSRQSQDFNENDLAEFIAYYQQRTIEYFDKYEFKFRAPNEYRDFKEFTDHVTSQGYQVVFKPICGDYIDSLTQNGELYLFQIYNKDFSPYSKGKPNLHTLYWKALFEEANLNNVVAKLNGEAEIFFRRHSIKASDKVVHPANQAIDNKNPHTEKTQSIFEYDLVKDKRYTQDKFFFHVPISLNFKAQGVVRFNDKINGLLAAQDDVHVIGIDRGERHLLYYTVVNGKGEVVEQGSLNQVATDQGYVVDYQQKLHAKEKERDQARKNWSTIENIKELKAGYLSQVVHKLAQLIVKHNAIVCLEDLNFGFKRGRFKVEKQVYQKFEKALIDKLNYLVFKERGATQAGGYLNAYQLAAPFESFEKLGKQTGILYYVRSDYTSKIDPATGFVDFLKPKYESMAKSKVFFESFERIQWNQAKGYFEFEFDYKKMCPSRKFGDYRTRWVVCTFGDTRYQNRRNKSSGQWETETIDVTAQLKALFAAYGITYNQEDNIKDAIAAVKYTKFYKQLYWLLRLTLSLRHSVTGTDEDFILSPVADENGVFFDSRKATDKQPKDADANGAYHIALKGLWNLQQIRQHDWNVEKPKKLNLAMKNEEWFGFAQKKKFRA

SEQ ID NO: 2843 - protein, 1295 aa, synthetic construct
MFNNFIKKYSLQKTLRFELKPVGETADYIEDFKSEYLKDTVLKDEQRAKDYQEIKTLIDDYHREYIEECLREPVDKKTGEILDFTQDLEDAFSYYQKLKENPTENRVGWEKEQESLRKKLVTSFVGNDGLFKKEFITRDLPEWLQKKGLWGEYKDTVENFKKFTTYFSGFHENRKNMYTAEAQSTAIANRLMNDNLPKFFNNYLAYQTIKEKHPDLVFRLDDALLQAAGVEHLDEAFQPRYFSRLFAQSGITAFNELIGGRTTENGEKIQGLNEQINLYRQQNPEKAKGFPRFMPLFKQILSDRETHSFLPDAFENDKELLQALRDYVDAATSEEGMISQLNKAMNQFVTADLKRVYIKSAALTSLSQELFHFFGVISDAIAWYAEKRLSPKKAQESFLKQEVYAIEELNQAVVGYIDQLEDQSELQQLLVDLPDPQKPVSSFILTHWQKSQEPLQAVIAKVEPLFELEELSKNKRAPKHDKDQGGEGFQQVDAIKNMLDAFMEVSHAIKPLYLVKGRKAIDMPDVDTGFYADFAEAYSAYEQVTVSLYNKTRNHLSKKPYSTEKIKLNFENPALLGGWPVDREIATSGVIFKENDLFYLGILDKKDKKNFKNLPKPSNKKDVLFKMNYLQAADPSKDVQNLMVINGKTVKKNGRIEKEGKHAGENIRLEQLKNENLPQDVNTIRKNKSYSKQSLNFNKKDLVKFIDFYKQRTIEYFKNFNFQFKKSEDYSDFSDFTEHINQQAYQIKFIEISKAFVDSLVNEGKLYLFQIYNKDFSPYSKGKPNLHTLYWKMLFDEDNLKDVVYKLNGEAEVFYRKKSIAEKNNVVHKANENLPNKNPDNPKATSKFDYDIIKDKRYTLDKFQFHVPITMNFKAEGVVRFNDKINGLLAAQDDVHVIGIDRGERHLLYYTVVNGKGEVVEQGSLNQVATDQGYVVDYQQKLHAKEKERDQARKNWSTIENIKELKAGYLSQVVHKLAQLIVKHNAIVCLEDLNFGFKRGRFKVEKQVYQKFEKALIDKLNYLVFKERGATQAGGYLNAYQLAAPFESFEKLGKQTGILYYVRSDYTSKIDPATGFVDFLKPKYESMAKSKVFFESFERIQWNQAKGYFEFEFDYKKMCPSRKFGDYRTRWVVCTFGDTRYQNRRNKSSGQWETETIDVTAQLKALFAAYGITYNQEDNIKDAIAAVKYTKFYKQLYWLLRLTLSLRHSVTGTDEDFILSPVADENGVFFDSRKATDKQPKDADANGAYHIALKGLWNLQQIRQHDWNVEKPKKLNLAMKNEEWFGFAQKKKFRA

SEQ ID NO: 2844 - protein, 1331 aa, synthetic construct
MFNNFIKKYSLQKTLRFELKPVGETADYIEDFKSEYLKDTVLKDEQRAKDYQEIKTLIDDYHREYIEECLREPVDKKTGEILDFTQDLEDAFSYYQKLKENPTENRVGWEKEQESLRKKLVTSFVGNDGLFKKEFITRDLPEWLQKKGLWGEYKDTVENFKKFTTYFSGFHENRKNMYTAEAQSTAIANRLMNDNLPKFFNNYLAYQTIKEKHPDLVFRLDDALLQAAGVEHLDEAFQPRYFSRLFAQSGITAFNELIGGRTTENGEKIQGLNEQINLYRQQNPEKAKGFPRFMPLFKQILSDRETHSFLPDAFENDKELLQALRDYVDAATSEEGMISQLNKAMNQFVTADLKRVYIKSAALTSLSQELFHFFGVISDAIAWYAEKRLSPKKAQESFLKQEVYAIEELNQAVVGYIDQLEDQSELQQLLVDLPDPQKPVSSFILTHWQKSQEPLQAVIAKVEPLFELEELSKNKRAPKHDKDQGGEGFQQVDAIKNMLDAFMEVSHAIKPLYLVKGRKAIDMPDVDTGFYADFAEAYSAYEQVTVSLYNKTRNHLSKKPYSTEKFKLNFENKGQFLGGWVDSHTENSDNATQAGGYLFRKKNQIGEYDYFLGVSSDSKLFRSHLRNEIVDEDKSEFERLDYYQLKSASVYGNSYIGNQSYDKDKENLFDSIIEFANRNNPAAKEDFNKYISSQKGDNKPTPNGLLKILQEKHSKALEELMIDGDFIRINTIVTDNLKNTILSLNRIPKSQEYKNTIFTLFTEPIQVIEELSKEKSFSYFPVSAKELEDSLNRELKPLLLFKISNQDLSYADSFSQGKRKSRGRENMHTLYFRQLMSGSQNILDIGTGEVFFRKSSIENPTIHKANEAVTNKNPLAKKKDSAFEYDIIKDRRFTVDKFQFHLSIIMNYQKPQKVVRFNDKINGLLAAQDDVHVIGIDRGERHLLYYTVVNGKGEVVEQGSLNQVATDQGYVVDYQQKLHAKEKERDQARKNWSTIENIKELKAGYLSQVVHKLAQLIVKHNAIVCLEDLNFGFKRGRFKVEKQVYQKFEKALIDKLNYLVFKERGATQAGGYLNAYQLAAPFESFEKLGKQTGILYYVRSDYTSKIDPATGFVDFLKPKYESMAKSKVFFESFERIQWNQAKGYFEFEFDYKKMCPSRKFGDYRTRWVVCTFGDTRYQNRRNKSSGQWETETIDVTAQLKALFAAYGITYNQEDNIKDAIAAVKYTKFYKQLYWLLRLTLSLRHSVTGTDEDFILSPVADENGVFFDSRKATDKQPKDADANGAYHIALKGLWNLQQIRQHDWNVEKPKKLNLAMKNEEWFGFAQKKKFRA

SEQ ID NO: 2845 - protein, 1330 aa, synthetic construct
MFNNFIKKYSLQKTLRFELKPVGETADYIEDFKSEYLKDTVLKDEQRAKDYQEIKTLIDDYHREYIEECLREPVDKKTGEILDFTQDLEDAFSYYQKLKENPTENRVGWEKEQESLRKKLVTSFVGNDGLFKKEFITRDLPEWLQKKGLWGEYKDTVENFKKFTTYFSGFHENRKNMYTAEAQSTAIANRLMNDNLPKFFNNYLAYQTIKEKHPDLVFRLDDALLQAAGVEHLDEAFQPRYFSRLFAQSGITAFNELIGGRTTENGEKIQGLNEQINLYRQQNPEKAKGFPRFMPLFKQILSDRETHSFLPDAFENDKELLQALRDYVDAATSEEGMISQLNKAMNQFVTADLKRVYIKSAALTSLSQELFHFFGVISDAIAWYAEKRLSPKKAQESFLKQEVYAIEELNQAVVGYIDQLEDQSELQQLLVDLPDPQKPVSSFILTHWQKSQEPLQAVIAKVEPLFELEELSKNKRAPKHDKDQGGEGFQQVDAIKNMLDAFMEVSHAIKPLYLVKGRKAIDMPDVDTGFYADFAEAYSAYEQVTVSLYNKTRNHLSKKPYSMEKFKLNFENKGNFLGGWVDSSTEKSDNGTQSGGYLFRKRNGIGEFDYYLGISSDPKLFRSHLQDEIEKEDISDFERLDYYQLKSATVFGNSYVGDSYSKDRDLLYQKILEFVENTEPLKADIDKYVSSQKGTNQPTPSGIISIVKEKYPELLQKLKDDQGFSEINKTVTDRLKKTILSLHRIPRSQEYKNHNFSLFTEAIEVIEELSSEKSFAYFKVSKSELENALNRDSKPLFLFKITNKDLSFADSFIAGKRKSRGTDNLHTLYFKALMSGSQNVFDIGTGEVFYRKEDYKGKKIVHKANEPIENKNRLNDKKHSLFEYDIVKNRRYLVDKFQFHLSIVQNYIKPKKVVRFNDKINGLLAAQDDVHVIGIDRGERHLLYYTVVNGKGEVVEQGSLNQVATDQGYVVDYQQKLHAKEKERDQARKNWSTIENIKELKAGYLSQVVHKLAQLIVKHNAIVCLEDLNFGFKRGRFKVEKQVYQKFEKALIDKLNYLVFKERGATQAGGYLNAYQLAAPFESFEKLGKQTGILYYVRSDYTSKIDPATGFVDFLKPKYESMAKSKVFFESFERIQWNQAKGYFEFEFDYKKMCPSRKFGDYRTRWVVCTFGDTRYQNRRNKSSGQWETETIDVTAQLKALFAAYGITYNQEDNIKDAIAAVKYTKFYKQLYWLLRLTLSLRHSVTGTDEDFILSPVADENGVFFDSRKATDKQPKDADANGAYHIALKGLWNLQQIRQHDWNVEKPKKLNLAMKNEEWFGFAQKKKFRA

SEQ ID NO: 2846 - protein, 1283 aa, synthetic construct
MFNNFIKKYSLQKTLRFELKPVGETADYIEDFKSEYLKDTVLKDEQRAKDYQEIKTLIDDYHREYIEECLREPVDKKTGEILDFTQDLEDAFSYYQKLKENPTENRVGWEKEQESLRKKLVTSFVGNDGLFKKEFITRDLPEWLQKKGLWGEYKDTVENFKKFTTYFSGFHENRKNMYTAEAQSTAIANRLMNDNLPKFFNNYLAYQTIKEKHPDLVFRLDDALLQAAGVEHLDEAFQPRYFSRLFAQSGITAFNELIGGRTTENGEKIQGLNEQINLYRQQNPEKAKGFPRFMPLFKQILSDRETHSFLPDAFENDKELLQALRDYVDAATSEEGMISQLNKAMNQFVTADLKRVYIKSAALTSLSQELFHFFGVISDAIAWYAEKRLSPKKAQESFLKQEVYAIEELNQAVVGYIDQLEDQSELQQLLVDLPDPQKPVSSFILTHWQKSQEPLQAVIAKVEPLFELEELSKNKRAPKHDKDQGGEGFQQVDAIKNMLDAFMEVSHAIKPLYLVKGRKAIDMPDVDTGFYADFAEAYSAYEQVTVSLYNKTRNHLSKKPFSTDKFKLNFESGYLLNGWSQDYDTRAGLLFEKDGNYYLGVNVKKLTEDEKQYLLDNPNENLSKRVILDFQKPDNKNIPRLFIRSKGDNFAPAVTIYNLPIQSVIEIYDNGKFKTEYRKKNPKDYLDSLHKLIDYFKQGFLQHESYKHYKFGWKNTKDYLDIAQFYKDVETSCYEVKYEEVNWDRLMNYVESGKLYLFQIYNKDFSPYSKGTPNMHTLYWKMLFDKDNLSNVVYKLNGQAEIFFRKKSITNNIVTHDANEPINNKNSDNPKKSSTFDYDIIKDKRYTVDKFGFHVPITMNFKANGVVRFNDKINGLLAAQDDVHVIGIDRGERHLLYYTVVNGKGEVVEQGSLNQVATDQGYVVDYQQKLHAKEKERDQARKNWSTIENIKELKAGYLSQVVHKLAQLIVKHNAIVCLEDLNFGFKRGRFKVEKQVYQKFEKALIDKLNYLVFKERGATQAGGYLNAYQLAAPFESFEKLGKQTGILYYVRSDYTSKIDPATGFVDFLKPKYESMAKSKVFFESFERIQWNQAKGYFEFEFDYKKMCPSRKFGDYRTRWVVCTFGDTRYQNRRNKSSGQWETETIDVTAQLKALFAAYGITYNQEDNIKDAIAAVKYTKFYKQLYWLLRLTLSLRHSVTGTDEDFILSPVADENGVFFDSRKATDKQPKDADANGAYHIALKGLWNLQQIRQHDWNVEKPKKLNLAMKNEEWFGFAQKKKFRA

SEQ ID NO: 2847 - protein, 1271 aa, synthetic construct
MFNNFIKKYSLQKTLRFELKPVGETADYIEDFKSEYLKDTVLKDEQRAKDYQEIKTLIDDYHREYIEECLREPVDKKTGEILDFTQDLEDAFSYYQKLKENPTENRVGWEKEQESLRKKLVTSFVGNDGLFKKEFITRDLPEWLQKKGLWGEYKDTVENFKKFTTYFSGFHENRKNMYTAEAQSTAIANRLMNDNLPKFFNNYLAYQTIKEKHPDLVFRLDDALLQAAGVEHLDEAFQPRYFSRLFAQSGITAFNELIGGRTTENGEKIQGLNEQINLYRQQNPEKAKGFPRFMPLFKQILSDRETHSFLPDAFENDKELLQALRDYVDAATSEEGMISQLNKAMNQFVTADLKRVYIKSAALTSLSQELFHFFGVISDAIAWYAEKRLSPKKAQESFLKQEVYAIEELNQAVVGYIDQLEDQSELQQLLVDLPDPQKPVSSFILTHWQKSQEPLQAVIAKVEPLFELEELSKNKRAPKHDKDQGGEGFQQVDAIKNMLDAFMEVSHAIKPLYLVKGRKAIDMPDVDTGFYADFAEAYSAYEQVTVSLYNKTRNHLSKKPYSTEKIKLNFENSVLLGGWDRNIEDTKGGVIFRKDGQFYLGIINKNNKTILKNPPKAKDGEVAFEKMFYKLIPNPARDLHHTILSKKRSAKYKPTKTLLEKYEQKKHIKGDNFDKKFCHELIDFFKESIKKNPDWETFNFKFSETSSYEDISGFYREVGRQGYKVVFERIPASYIETLVKEGKLYLFKIWSKDFSKDSKGTPNMHTLYWRALFDEKNLKEPIYKLNGEAEMFFRKRSVEPKITHPAGKPIPNKNPDNLKKESVFKYDLIKDRRYSLDKFQFHVPITTNFGSEGVVRFNDKINGLLAAQDDVHVIGIDRGERHLLYYTVVNGKGEVVEQGSLNQVATDQGYVVDYQQKLHAKEKERDQARKNWSTIENIKELKAGYLSQVVHKLAQLIVKHNAIVCLEDLNFGFKRGRFKVEKQVYQKFEKALIDKLNYLVFKERGATQAGGYLNAYQLAAPFESFEKLGKQTGILYYVRSDYTSKIDPATGFVDFLKPKYESMAKSKVFFESFERIQWNQAKGYFEFEFDYKKMCPSRKFGDYRTRWVVCTFGDTRYQNRRNKSSGQWETETIDVTAQLKALFAAYGITYNQEDNIKDAIAAVKYTKFYKQLYWLLRLTLSLRHSVTGTDEDFILSPVADENGVFFDSRKATDKQPKDADANGAYHIALKGLWNLQQIRQHDWNVEKPKKLNLAMKNEEWFGFAQKKKFRA

SEQ ID NO: 2848 - protein, 1289 aa, synthetic construct
MFNNFIKKYSLQKTLRFELKPVGETADYIEDFKSEYLKDTVLKDEQRAKDYQEIKTLIDDYHREYIEECLREPVDKKTGEILDFTQDLEDAFSYYQKLKENPTENRVGWEKEQESLRKKLVTSFVGNDGLFKKEFITRDLPEWLQKKGLWGEYKDTVENFKKFTTYFSGFHENRKNMYTAEAQSTAIANRLMNDNLPKFFNNYLAYQTIKEKHPDLVFRLDDALLQAAGVEHLDEAFQPRYFSRLFAQSGITAFNELIGGRTTENGEKIQGLNEQINLYRQQNPEKAKGFPRFMPLFKQILSDRETHSFLPDAFENDKELLQALRDYVDAATSEEGMISQLNKAMNQFVTADLKRVYIKSAALTSLSQELFHFFGVISDAIAWYAEKRLSPKKAQESFLKQEVYAIEELNQAVVGYIDQLEDQSELQQLLVDLPDPQKPVSSFILTHWQKSQEPLQAVIAKVEPLFELEELSKNKRAPKHDKDQGGEGFQQVDAIKNMLDAFMEVSHAIKPLYLVKGRKAIDMPDVDTGFYADFAEAYSAYEQVTVSLYNKTRNHLSKKPFSTQKFKLNFQSSSFLNGWDSNFETKSAVILKKKINNKTNYYIAISPKKIENNENDFSVNKGNFEILNYDFQKPDNKNIPRLFIRSKGDNFSPNVEKYNLPVQEIIEIYDKGYFKTEFRKTNFSKFKESLVKLIDYFKLGFQRHESYKHFKFNWKESREYEDISQFYFDVESSCYQLNFKKINEEYIKQLVEENKLYLFQIYNKDFSQNKIKKENYNSKKNLHTMYFEELFSEENLEDVVFKLNGQAEIFYREKSIEYKPTHPKNLPTKNKDPINGKEESLFSYDIGKNKRYTQDKVLFHVPITLNFKSNSVVRFNDKINGLLAAQDDVHVIGIDRGERHLLYYTVVNGKGEVVEQGSLNQVATDQGYVVDYQQKLHAKEKERDQARKNWSTIENIKELKAGYLSQVVHKLAQLIVKHNAIVCLEDLNFGFKRGRFKVEKQVYQKFEKALIDKLNYLVFKERGATQAGGYLNAYQLAAPFESFEKLGKQTGILYYVRSDYTSKIDPATGFVDFLKPKYESMAKSKVFFESFERIQWNQAKGYFEFEFDYKKMCPSRKFGDYRTRWVVCTFGDTRYQNRRNKSSGQWETETIDVTAQLKALFAAYGITYNQEDNIKDAIAAVKYTKFYKQLYWLLRLTLSLRHSVTGTDEDFILSPVADENGVFFDSRKATDKQPKDADANGAYHIALKGLWNLQQIRQHDWNVEKPKKLNLAMKNEEWFGFAQKKKFRA

SEQ ID NO: 2849 - protein, 1281 aa, synthetic construct
MFNNFIKKYSLQKTLRFELKPVGETADYIEDFKSEYLKDTVLKDEQRAKDYQEIKTLIDDYHREYIEECLREPVDKKTGEILDFTQDLEDAFSYYQKLKENPTENRVGWEKEQESLRKKLVTSFVGNDGLFKKEFITRDLPEWLQKKGLWGEYKDTVENFKKFTTYFSGFHENRKNMYTAEAQSTAIANRLMNDNLPKFFNNYLAYQTIKEKHPDLVFRLDDALLQAAGVEHLDEAFQPRYFSRLFAQSGITAFNELIGGRTTENGEKIQGLNEQINLYRQQNPEKAKGFPRFMPLFKQILSDRETHSFLPDAFENDKELLQALRDYVDAATSEEGMISQLNKAMNQFVTADLKRVYIKSAALTSLSQELFHFFGVISDAIAWYAEKRLSPKKAQESFLKQEVYAIEELNQAVVGYIDQLEDQSELQQLLVDLPDPQKPVSSFILTHWQKSQEPLQAVIAKVEPLFELEELSKNKRAPKHDKDQGGEGFQQVDAIKNMLDAFMEVSHAIKPLYLVKGRKAIDMPDVDTGFYADFAEAYSAYEQVTVSLYNKTRNHLSKKPYSLDKIPVFFGKSSLLISWENGYNAKSCLLFQQGNNYYLGILNKKLDETDIKKLHTDAIADPATRFIINSQKVDNKNVPRLFIHSKGDNLAPSVKKYNLPIQNILNLYTQGYYKTDYAKINPKKFKASLIKLIDYFKLGFSQHEDFKNFTFQWKESEEYNNINEFYHDVAVSCYAISKEHVNFSALKSLVKENKLYLFQIYNKDFSTHSHGTPNLHTLYWKALFDDRNNLNKVFKLNGGATIYLRKGSIAKKITHPKNQPIESKNPLHKKQSVFGYDLIKDKRFTEDKLFLHCPITINFKYPAVVRFNDKINGLLAAQDDVHVIGIDRGERHLLYYTVVNGKGEVVEQGSLNQVATDQGYVVDYQQKLHAKEKERDQARKNWSTIENIKELKAGYLSQVVHKLAQLIVKHNAIVCLEDLNFGFKRGRFKVEKQVYQKFEKALIDKLNYLVFKERGATQAGGYLNAYQLAAPFESFEKLGKQTGILYYVRSDYTSKIDPATGFVDFLKPKYESMAKSKVFFESFERIQWNQAKGYFEFEFDYKKMCPSRKFGDYRTRWVVCTFGDTRYQNRRNKSSGQWETETIDVTAQLKALFAAYGITYNQEDNIKDAIAAVKYTKFYKQLYWLLRLTLSLRHSVTGTDEDFILSPVADENGVFFDSRKATDKQPKDADANGAYHIALKGLWNLQQIRQHDWNVEKPKKLNLAMKNEEWFGFAQKKKFRA

SEQ ID NO: 2850 - protein, 1323 aa, synthetic construct
MFNNFIKKYSLQKTLRFELKPVGETADYIEDFKSEYLKDTVLKDEQRAKDYQEIKTLIDDYHREYIEECLREPVDKKTGEILDFTQDLEDAFSYYQKLKENPTENRVGWEKEQESLRKKLVTSFVGNDGLFKKEFITRDLPEWLQKKGLWGEYKDTVENFKKFTTYFSGFHENRKNMYTAEAQSTAIANRLMNDNLPKFFNNYLAYQTIKEKHPDLVFRLDDALLQAAGVEHLDEAFQPRYFSRLFAQSGITAFNELIGGRTTENGEKIQGLNEQINLYRQQNPEKAKGFPRFMPLFKQILSDRETHSFLPDAFENDKELLQALRDYVDAATSEEGMISQLNKAMNQFVTADLKRVYIKSAALTSLSQELFHFFGVISDAIAWYAEKRLSPKKAQESFLKQEVYAIEELNQAVVGYIDQLEDQSELQQLLVDLPDPQKPVSSFILTHWQKSQEPLQAVIAKVEPLFELEELSKNKRAPKHDKDQGGEGFQQVDAIKNMLDAFMEVSHAIKPLYLVKGRKAIDMPDVDTGFYADFAEAYSAYEQVTVSLYNKTRNHLSKKPYSNDKIRLFFDNNSYFLNGFVESKTDTSDHGTQYGGYLFRKRNSFGEYDYFLGCSKNTKLFREHLASSISEEDKSEFERFYYYQLKTQTIYNNYKNQNGESYEIDKQKLKDAILEATKECGLPFSYEREDTPTNYLKKIENENPSLFKLVISNENVMQLQLSIIKNLKTVFGKYVSKVPALKDVIDREYKLLKDFNDDIQTVSSNKIIYYAPVSQKELEELQNQKEDLKKNAKLYLFKIENKDLRDKSKRINKIGTDNLHTMYFKALMSENQYTFDIGAGMVFFREQNYTGKKIIHEKNKPIKNKTYGYTKKESVFEYDISKDKRYFEDKFFLHLSLSINYTKSSVVRFNDKINGLLAAQDDVHVIGIDRGERHLLYYTVVNGKGEVVEQGSLNQVATDQGYVVDYQQKLHAKEKERDQARKNWSTIENIKELKAGYLSQVVHKLAQLIVKHNAIVCLEDLNFGFKRGRFKVEKQVYQKFEKALIDKLNYLVFKERGATQAGGYLNAYQLAAPFESFEKLGKQTGILYYVRSDYTSKIDPATGFVDFLKPKYESMAKSKVFFESFERIQWNQAKGYFEFEFDYKKMCPSRKFGDYRTRWVVCTFGDTRYQNRRNKSSGQWETETIDVTAQLKALFAAYGITYNQEDNIKDAIAAVKYTKFYKQLYWLLRLTLSLRHSVTGTDEDFILSPVADENGVFFDSRKATDKQPKDADANGAYHIALKGLWNLQQIRQHDWNVEKPKKLNLAMKNEEWFGFAQKKKFRA

SEQ ID NO: 2851 - protein, 1291 aa, synthetic construct
MFNNFIKKYSLQKTLRFELKPVGETADYIEDFKSEYLKDTVLKDEQRAKDYQEIKTLIDDYHREYIEECLREPVDKKTGEILDFTQDLEDAFSYYQKLKENPTENRVGWEKEQESLRKKLVTSFVGNDGLFKKEFITRDLPEWLQKKGLWGEYKDTVENFKKFTTYFSGFHENRKNMYTAEAQSTAIANRLMNDNLPKFFNNYLAYQTIKEKHPDLVFRLDDALLQAAGVEHLDEAFQPRYFSRLFAQSGITAFNELIGGRTTENGEKIQGLNEQINLYRQQNPEKAKGFPRFMPLFKQILSDRETHSFLPDAFENDKELLQALRDYVDAATSEEGMISQLNKAMNQFVTADLKRVYIKSAALTSLSQELFHFFGVISDAIAWYAEKRLSPKKAQESFLKQEVYAIEELNQAVVGYIDQLEDQSELQQLLVDLPDPQKPVSSFILTHWQKSQEPLQAVIAKVEPLFELEELSKNKRAPKHDKDQGGEGFQQVDAIKNMLDAFMEVSHAIKPLYLVKGRKAIDMPDVDTGFYADFAEAYSAYEQVTVSLYNKTRNHLSKKPYSTEKIKLNFNSPTLLNGWDKNKEQDNLGIILIKNEKYYLGIISHKNRFIIDDFCTDASMENGYKKVVYRQIADASKDLPNLIEVNEKTIRKTGRKNDKGVNVILEEFKETYLPKKINQIRKSESYKISSKNFSKEDLTAYIDYYMQRIIAYKSDFTFIFKKPEEYNSYTEFIKDIDRQKYYLSYEYISYEDIKSLVDTGKLYLFQIYNKDFSASSKGKKNLHTMYWKALFDEKNLKDIVYKLNGQAEIFYRKASIPQESIVRHQKGDEMEFKNPLRNGNGERFKYEIVKDRRYTVDKFQFHVPITMNFKSPGVVRFNDKINGLLAAQDDVHVIGIDRGERHLLYYTVVNGKGEVVEQGSLNQVATDQGYVVDYQQKLHAKEKERDQARKNWSTIENIKELKAGYLSQVVHKLAQLIVKHNAIVCLEDLNFGFKRGRFKVEKQVYQKFEKALIDKLNYLVFKERGATQAGGYLNAYQLAAPFESFEKLGKQTGILYYVRSDYTSKIDPATGFVDFLKPKYESMAKSKVFFESFERIQWNQAKGYFEFEFDYKKMCPSRKFGDYRTRWVVCTFGDTRYQNRRNKSSGQWETETIDVTAQLKALFAAYGITYNQEDNIKDAIAAVKYTKFYKQLYWLLRLTLSLRHSVTGTDEDFILSPVADENGVFFDSRKATDKQPKDADANGAYHIALKGLWNLQQIRQHDWNVEKPKKLNLAMKNEEWFGFAQKKKFRA

SEQ ID NO: 2852 - protein, 1274 aa, synthetic construct
MFNNFIKKYSLQKTLRFELKPVGETADYIEDFKSEYLKDTVLKDEQRAKDYQEIKTLIDDYHREYIEECLREPVDKKTGEILDFTQDLEDAFSYYQKLKENPTENRVGWEKEQESLRKKLVTSFVGNDGLFKKEFITRDLPEWLQKKGLWGEYKDTVENFKKFTTYFSGFHENRKNMYTAEAQSTAIANRLMNDNLPKFFNNYLAYQTIKEKHPDLVFRLDDALLQAAGVEHLDEAFQPRYFSRLFAQSGITAFNELIGGRTTENGEKIQGLNEQINLYRQQNPEKAKGFPRFMPLFKQILSDRETHSFLPDAFENDKELLQALRDYVDAATSEEGMISQLNKAMNQFVTADLKRVYIKSAALTSLSQELFHFFGVISDAIAWYAEKRLSPKKAQESFLKQEVYAIEELNQAVVGYIDQLEDQSELQQLLVDLPDPQKPVSSFILTHWQKSQEPLQAVIAKVEPLFELEELSKNKRAPKHDKDQGGEGFQQVDAIKNMLDAFMEVSHAIKPLYLVKGRKAIDMPDVDTGFYADFAEAYSAYEQVTVSLYNKTRNHLSKKPYSTEKFKINFENSTLLDGWDVNKETDNTSVILRKDGKYYLGIMNKEHNKIFDYIPKANNNEDCYEKMNYKLLPGPNKMLPKVFFSKKNIEYFNPSEEILKIRNNGTYKKNGENFNLNDCHKLIDFYKESINKHPEWNHFNFKFSPTKEYEDISEFYKEVENQGYKISFDNISENYIDEKVKEGKLYLFQIYNKDFSPYSKGKPNLHTLYWKALFDEENLKDVVLKLNGEAEIFYRKKSIEKNDKIIHKKNQPIENKNPNNPKKQSKFEYDIIKDKRYTEDKFFFHVPITLNFKAQGVVRFNDKINGLLAAQDDVHVIGIDRGERHLLYYTVVNGKGEVVEQGSLNQVATDQGYVVDYQQKLHAKEKERDQARKNWSTIENIKELKAGYLSQVVHKLAQLIVKHNAIVCLEDLNFGFKRGRFKVEKQVYQKFEKALIDKLNYLVFKERGATQAGGYLNAYQLAAPFESFEKLGKQTGILYYVRSDYTSKIDPATGFVDFLKPKYESMAKSKVFFESFERIQWNQAKGYFEFEFDYKKMCPSRKFGDYRTRWVVCTFGDTRYQNRRNKSSGQWETETIDVTAQLKALFAAYGITYNQEDNIKDAIAAVKYTKFYKQLYWLLRLTLSLRHSVTGTDEDFILSPVADENGVFFDSRKATDKQPKDADANGAYHIALKGLWNLQQIRQHDWNVEKPKKLNLAMKNEEWFGFAQKKKFRA

SEQ ID NO: 2853 - protein, 1274 aa, synthetic construct
MFNNFIKKYSLQKTLRFELKPVGETADYIEDFKSEYLKDTVLKDEQRAKDYQEIKTLIDDYHREYIEECLREPVDKKTGEILDFTQDLEDAFSYYQKLKENPTENRVGWEKEQESLRKKLVTSFVGNDGLFKKEFITRDLPEWLQKKGLWGEYKDTVENFKKFTTYFSGFHENRKNMYTAEAQSTAIANRLMNDNLPKFFNNYLAYQTIKEKHPDLVFRLDDALLQAAGVEHLDEAFQPRYFSRLFAQSGITAFNELIGGRTTENGEKIQGLNEQINLYRQQNPEKAKGFPRFMPLFKQILSDRETHSFLPDAFENDKELLQALRDYVDAATSEEGMISQLNKAMNQFVTADLKRVYIKSAALTSLSQELFHFFGVISDAIAWYAEKRLSPKKAQESFLKQEVYAIEELNQAVVGYIDQLEDQSELQQLLVDLPDPQKPVSSFILTHWQKSQEPLQAVIAKVEPLFELEELSKNKRAPKHDKDQGGEGFQQVDAIKNMLDAFMEVSHAIKPLYLVKGRKAIDMPDVDTGFYADFAEAYSAYEQVTVSLYNKTRNHLSKKPYSTEKFKLNFENSTLLDGWDVNKETDNTSVILRKDGLYYLGIMNKKHNKIFKNIPKSNNDEDCYEKMNYKLLPGANKMLPKVFFSKKNIEYFNPSEEILEIYNNGTYKKNGDNFNLNDCHKLIDFFKESINKHEDWKHFNFKFSPTKEYEDISEFYREVENQGYKITFENISENYIDELVDEGKLYLFQIYNKDFSPYSKGKPNLHTLYWKMLFDEENLKDVVYKLNGQAEIFYRKKSIEHENKIIHKANQPIENKNPNNPKKKSKFDYDIIKDKRYTVDKFQFHVPITMNFKANGVVRFNDKINGLLAAQDDVHVIGIDRGERHLLYYTVVNGKGEVVEQGSLNQVATDQGYVVDYQQKLHAKEKERDQARKNWSTIENIKELKAGYLSQVVHKLAQLIVKHNAIVCLEDLNFGFKRGRFKVEKQVYQKFEKALIDKLNYLVFKERGATQAGGYLNAYQLAAPFESFEKLGKQTGILYYVRSDYTSKIDPATGFVDFLKPKYESMAKSKVFFESFERIQWNQAKGYFEFEFDYKKMCPSRKFGDYRTRWVVCTFGDTRYQNRRNKSSGQWETETIDVTAQLKALFAAYGITYNQEDNIKDAIAAVKYTKFYKQLYWLLRLTLSLRHSVTGTDEDFILSPVADENGVFFDSRKATDKQPKDADANGAYHIALKGLWNLQQIRQHDWNVEKPKKLNLAMKNEEWFGFAQKKKFRA

SEQ ID NO: 2854 - protein, 1273 aa, synthetic construct
MFNNFIKKYSLQKTLRFELKPVGETADYIEDFKSEYLKDTVLKDEQRAKDYQEIKTLIDDYHREYIEECLREPVDKKTGEILDFTQDLEDAFSYYQKLKENPTENRVGWEKEQESLRKKLVTSFVGNDGLFKKEFITRDLPEWLQKKGLWGEYKDTVENFKKFTTYFSGFHENRKNMYTAEAQSTAIANRLMNDNLPKFFNNYLAYQTIKEKHPDLVFRLDDALLQAAGVEHLDEAFQPRYFSRLFAQSGITAFNELIGGRTTENGEKIQGLNEQINLYRQQNPEKAKGFPRFMPLFKQILSDRETHSFLPDAFENDKELLQALRDYVDAATSEEGMISQLNKAMNQFVTADLKRVYIKSAALTSLSQELFHFFGVISDAIAWYAEKRLSPKKAQESFLKQEVYAIEELNQAVVGYIDQLEDQSELQQLLVDLPDPQKPVSSFILTHWQKSQEPLQAVIAKVEPLFELEELSKNKRAPKHDKDQGGEGFQQVDAIKNMLDAFMEVSHAIKPLYLVKGRKAIDMPDVDTGFYADFAEAYSAYEQVTVSLYNKTRNHLSKKPYSTEKIKLNFENSTLLDGWDVNKETDNTSVILRKDGLYYLGIMNKKHNKIFKNIPKSNNDGDCYEKMDYKLLPGANKMLPKVFFSKKNIEEFNPSEEILEIYNNGTYKKNGDNFNLDDCHKLIDFFKESINKHEDWKKFNFKFSDTKEYEDISEFYREVENQGYKITFKNISENYINELVDEGKLYLFQIYNKDFSPYSKGTPNLHTLYWKMLFDEENLKDVVYKLNGQAEIFYRKKSIEHNKIIHKANQPIENKNPNNKKKKSIFDYDLIKDKRYTVDKFQFHVPITMNFKANGVVRFNDKINGLLAAQDDVHVIGIDRGERHLLYYTVVNGKGEVVEQGSLNQVATDQGYVVDYQQKLHAKEKERDQARKNWSTIENIKELKAGYLSQVVHKLAQLIVKHNAIVCLEDLNFGFKRGRFKVEKQVYQKFEKALIDKLNYLVFKERGATQAGGYLNAYQLAAPFESFEKLGKQTGILYYVRSDYTSKIDPATGFVDFLKPKYESMAKSKVFFESFERIQWNQAKGYFEFEFDYKKMCPSRKFGDYRTRWVVCTFGDTRYQNRRNKSSGQWETETIDVTAQLKALFAAYGITYNQEDNIKDAIAAVKYTKFYKQLYWLLRLTLSLRHSVTGTDEDFILSPVADENGVFFDSRKATDKQPKDADANGAYHIALKGLWNLQQIRQHDWNVEKPKKLNLAMKNEEWFGFAQKKKFRA

SEQ ID NO: 2855-2863 - skipped (9 entries)

SEQ ID NO: 2864 - protein, 5 aa, synthetic construct
GGGGS

SEQ ID NO: 2865 - RNA, 100 nt, synthetic construct
  source 1..100: mol_type = other RNA
aaaaaaaaaaaaaaaaaaaaaaaaaaaaaaaaaaaaaaaaaaaaaaaaaaaaaaaaaaaaaaaaaaaaaaaaaaaaaaaaaaaaaaaaaaaaaaaaaaaa

SEQ ID NO: 2866 - DNA, 24 bp, synthetic construct
  source 1..24: mol_type = other DNA
gtaaagaaaaacaaggaatgtaat

SEQ ID NO: 2867 - DNA, 23 bp, synthetic construct
  source 1..23: mol_type = other DNA
gcaaagtagagaaatgacaaacc

SEQ ID NO: 2868 - DNA, 24 bp, synthetic construct
  source 1..24: mol_type = other DNA
atctgtcaacttctgttttaggac

SEQ ID NO: 2869 - DNA, 23 bp, synthetic construct
  source 1..23: mol_type = other DNA
accaagtcagatataaactgtct

SEQ ID NO: 2870 - DNA, 20 bp, synthetic construct
  source 1..20: mol_type = other DNA
tttcatggatgccccgttca

SEQ ID NO: 2871 - DNA, 20 bp, synthetic construct
  source 1..20: mol_type = other DNA
acgaaaagccagcaggaaga

SEQ ID NO: 2872 - DNA, 20 bp, synthetic construct
  source 1..20: mol_type = other DNA
agccccaagaacttttccct

SEQ ID NO: 2873 - DNA, 20 bp, synthetic construct
  source 1..20: mol_type = other DNA
tgcatcagtggttgtcaggg

SEQ ID NO: 2874 - DNA, 20 bp, synthetic construct
  source 1..20: mol_type = other DNA
cctagctgtgactttgggca

SEQ ID NO: 2875 - DNA, 21 bp, synthetic construct
  source 1..21: mol_type = other DNA
tggaaagaagaggagcaggac

SEQ ID NO: 2876 - DNA, 21 bp, synthetic construct
  source 1..21: mol_type = other DNA
aggctggatgttcaggttctt

SEQ ID NO: 2877 - DNA, 20 bp, synthetic construct
  source 1..20: mol_type = other DNA
tcccaaagccaaagccctta

SEQ ID NO: 2878 - DNA, 23 bp, synthetic construct
  source 1..23: mol_type = other DNA
agcagaaataactccagtagcca

SEQ ID NO: 2879 - DNA, 21 bp, synthetic construct
  source 1..21: mol_type = other DNA
gctggctgaaaatcgtgtcaa

SEQ ID NO: 2880 - DNA, 20 bp, synthetic construct
  source 1..20: mol_type = other DNA
tccttggggcttctctttgg

SEQ ID NO: 2881 - DNA, 27 bp, synthetic construct
  source 1..27: mol_type = other DNA
actgattaagaccactagagtatcaca

SEQ ID NO: 2882 - DNA, 22 bp, synthetic construct
  source 1..22: mol_type = other DNA
catgttgttcataatcattgat

SEQ ID NO: 2883 - DNA, 22 bp, synthetic construct
  source 1..22: mol_type = other DNA
atcaatgattatgaacaacatg

SEQ ID NO: 2884 - DNA, 22 bp, synthetic construct
  source 1..22: mol_type = other DNA
atatgactattacaggtctggg

SEQ ID NO: 2885 - DNA, 22 bp, synthetic construct
  source 1..22: mol_type = other DNA
atattgcagcattttccaggta

SEQ ID NO: 2886 - DNA, 22 bp, synthetic construct
  source 1..22: mol_type = other DNA
attggcatgctgaccctctgtc

SEQ ID NO: 2887 - DNA, 22 bp, synthetic construct
  source 1..22: mol_type = other DNA
caggtaaggtgtgtccactgtc

SEQ ID NO: 2888 - DNA, 22 bp, synthetic construct
  source 1..22: mol_type = other DNA
ctggtttcaaaatttttcatcc

SEQ ID NO: 2889 - DNA, 22 bp, synthetic construct
  source 1..22: mol_type = other DNA
actggtttcaaaatttttcatc

SEQ ID NO: 2890 - DNA, 22 bp, synthetic construct
  source 1..22: mol_type = other DNA
ttatgcatttcttattttagga

SEQ ID NO: 2891 - DNA, 22 bp, synthetic construct
  source 1..22: mol_type = other DNA
tatgcatttcttattttaggat

SEQ ID NO: 2892 - DNA, 22 bp, synthetic construct
  source 1..22: mol_type = other DNA
atgcatttcttattttaggatg

SEQ ID NO: 2893 - DNA, 22 bp, synthetic construct
  source 1..22: mol_type = other DNA
gaaaatgataaagtactggttt

SEQ ID NO: 2894 - DNA, 22 bp, synthetic construct
  source 1..22: mol_type = other DNA
agaaaatgataaagtactggtt

SEQ ID NO: 2895 - DNA, 22 bp, synthetic construct
  source 1..22: mol_type = other DNA
gtactttatcattttctcctga

SEQ ID NO: 2896 - DNA, 22 bp, synthetic construct
  source 1..22: mol_type = other DNA
tactttatcattttctcctgag

SEQ ID NO: 2897 - DNA, 22 bp, synthetic construct
  source 1..22: mol_type = other DNA
gcagcaagtccactgtcgtctc

SEQ ID NO: 2898 - DNA, 22 bp, synthetic construct
  source 1..22: mol_type = other DNA
tgcagcaagtccactgtcgtct

SEQ ID NO: 2899 - DNA, 22 bp, synthetic construct
  source 1..22: mol_type = other DNA
ccatctatcagctgggaagata

SEQ ID NO: 2900 - DNA, 22 bp, synthetic construct
  source 1..22: mol_type = other DNA
gtagagaaataaacgaacctct

SEQ ID NO: 2901 - DNA, 22 bp, synthetic construct
  source 1..22: mol_type = other DNA
agtagagaaataaacgaacctc

SEQ ID NO: 2902 - DNA, 38 bp, synthetic construct
  source 1..38: mol_type = other DNA
gctcttccgatctnnnnncccaagaacttttccctctc

SEQ ID NO: 2903 - DNA, 38 bp, synthetic construct
  source 1..38: mol_type = other DNA
gctcttccgatctnnnnngatgtcagtcttctcagcca

SEQ ID NO: 2904 - DNA, 40 bp, synthetic construct
  source 1..40: mol_type = other DNA
gctcttccgatctnnnnntatgaacgtatccacaaaggat

SEQ ID NO: 2905 - DNA, 39 bp, synthetic construct
  source 1..39: mol_type = other DNA
gctcttccgatctnnnnngagttggaatgtctctctcaa

SEQ ID NO: 2906 - DNA, 38 bp, synthetic construct
  source 1..38: mol_type = other DNA
gctcttccgatctnnnnncccccggctaatttgtatca

SEQ ID NO: 2907 - DNA, 38 bp, synthetic construct
  source 1..38: mol_type = other DNA
gctcttccgatctnnnnngagcagtgaacagccaattg

SEQ ID NO: 2908 - DNA, 40 bp, synthetic construct
  source 1..40: mol_type = other DNA
gctcttccgatctnnnnntctcctgaggaaaattttggag

SEQ ID NO: 2909 - DNA, 38 bp, synthetic construct
  source 1..38: mol_type = other DNA
gctcttccgatctnnnnntggagacgacagtggacttg

SEQ ID NO: 2910 - DNA, 42 bp, synthetic construct
  source 1..42: mol_type = other DNA
gctcttccgatctnnnnngtaaagaaaaacaaggaatgtaat

SEQ ID NO: 2911 - DNA, 42 bp, synthetic construct
  source 1..42: mol_type = other DNA
gctcttccgatctnnnnnatctgtcaacttctgttttaggac

SEQ ID NO: 2912 - DNA, 20 bp, synthetic construct
  source 1..20: mol_type = other DNA
  modified_base 5: mod_base = OTHER; note = Locked nucleic acid
  modified_base 9..10: mod_base = OTHER; note = Locked nucleic acid
  modified_base 12: mod_base = OTHER; note = Locked nucleic acid
  modified_base 16: mod_base = OTHER; note = Locked nucleic acid
agtgggtgccagaatgtgaa

SEQ ID NO: 2913 - DNA, 22 bp, synthetic construct
  source 1..22: mol_type = other DNA
  modified_base 9: mod_base = OTHER; note = Locked nucleic acid
  modified_base 13..14: mod_base = OTHER; note = Locked nucleic acid
catgaccacagtccatgccatc

SEQ ID NO: 2914 - DNA, 23 bp, synthetic construct
  source 1..23: mol_type = other DNA
ggggagaaaggtgttcaagatgt

SEQ ID NO: 2915 - DNA, 18 bp, synthetic construct
  source 1..18: mol_type = other DNA
gcaccaccaactgcttag

SEQ ID NO: 2916 - DNA, 22 bp, synthetic construct
  source 1..22: mol_type = other DNA
ctcaccaatgtcttgtcgatga

SEQ ID NO: 2917 - DNA, 19 bp, synthetic construct
  source 1..19: mol_type = other DNA
ccatccacagtcttctggg

SEQ ID NO: 2918 - protein, 4 aa, synthetic construct
GGGS

SEQ ID NO: 2919 - RNA, 110 nt, synthetic construct; identical to SEQ ID NO: 605
  source 1..110: mol_type = other RNA

SEQ ID NO: 2920 - RNA, 110 nt, synthetic construct; identical to SEQ ID NO: 606
  source 1..110: mol_type = other RNA

SEQ ID NO: 2921 - RNA, 110 nt, synthetic construct; identical to SEQ ID NO: 605
  source 1..110: mol_type = other RNA

SEQ ID NO: 2922 - RNA, 110 nt, synthetic construct; identical to SEQ ID NO: 606
  source 1..110: mol_type = other RNA

SEQ ID NO: 2923 - RNA, 110 nt, synthetic construct; identical to SEQ ID NO: 605
  source 1..110: mol_type = other RNA

SEQ ID NO: 2924 - RNA, 110 nt, synthetic construct; identical to SEQ ID NO: 605
  source 1..110: mol_type = other RNA

SEQ ID NO: 2925 - RNA, 88 nt, synthetic construct
  source 1..88: mol_type = other RNA
gttgagaatcgaaagattcttaataaggcatccttccgatgctgacttctcaccgtccgttttccaataggagcgggcggtatgtttt

SEQ ID NO: 2926 - protein, 6 aa, synthetic construct
KKPFSK

SEQ ID NO: 2927 - protein, 7 aa, synthetic construct
TQKPYSD

SEQ ID NO: 2928 - protein, 7 aa, synthetic construct
SKKPYKR

SEQ ID NO: 2929 - protein, 7 aa, synthetic construct
SRKPFKA

SEQ ID NO: 2930 - protein, 7 aa, synthetic construct
TQKPYST

SEQ ID NO: 2931 - protein, 7 aa, synthetic construct
TKKPYST

SEQ ID NO: 2932 - protein, 7 aa, synthetic construct
SKKPYSM

SEQ ID NO: 2933 - protein, 7 aa, synthetic construct
TKKPFST

SEQ ID NO: 2934 - protein, 7 aa, synthetic construct
TKKPYST

SEQ ID NO: 2935 - protein, 7 aa, synthetic construct
TKKPYST

SEQ ID NO: 2936 - protein, 7 aa, synthetic construct
SQKPFST

SEQ ID NO: 2937 - protein, 7 aa, synthetic construct
TKKQYSL

SEQ ID NO: 2938 - protein, 8 aa, synthetic construct
NFKSQGVV

SEQ ID NO: 2939 - protein, 8 aa, synthetic construct
NFKSSGAN

SEQ ID NO: 2940 - protein, 8 aa, synthetic construct
NFKNDKPG

SEQ ID NO: 2941 - protein, 8 aa, synthetic construct
NFKAQGVS

SEQ ID NO: 2942 - protein, 8 aa, synthetic construct
NFKAEGIF

SEQ ID NO: 2943 - protein, 9 aa, synthetic construct
NYQKPQKAS

SEQ ID NO: 2944 - protein, 9 aa, synthetic construct
NYIKPKKYP

SEQ ID NO: 2945 - protein, 8 aa, synthetic construct
NFKANGND

SEQ ID NO: 2946 - protein, 8 aa, synthetic construct
NFGSEGQE

SEQ ID NO: 2947 - protein, 8 aa, synthetic construct
NFKSPGDF

SEQ ID NO: 2948 - protein, 8 aa, synthetic construct
NFKSNSRV

SEQ ID NO: 2949 - protein, 8 aa, synthetic construct
NFKYPANI

SEQ ID NO: 2950 - protein, 100 aa, synthetic construct
  VARIANT 6..100: note = GGGGS repeats may be deleted
GGGGSGGGGSGGGGSGGGGSGGGGSGGGGSGGGGSGGGGSGGGGSGGGGSGGGGSGGGGSGGGGSGGGGSGGGGSGGGGSGGGGSGGGGSGGGGSGGGGS

SEQ ID NO: 2951 - protein, 40 aa, synthetic construct
  VARIANT 3..40: note = GS repeats may be deleted
GSGSGSGSGSGSGSGSGSGSGSGSGSGSGSGSGSGSGSGS

SEQ ID NO: 2952 - protein, 60 aa, synthetic construct
  VARIANT 4..60: note = GGS repeats may be deleted
GGSGGSGGSGGSGGSGGSGGSGGSGGSGGSGGSGGSGGSGGSGGSGGSGGSGGSGGSGGS

SEQ ID NO: 2953 - protein, 80 aa, synthetic construct
  VARIANT 5..80: note = GGGS repeats may be deleted
GGGSGGGSGGGSGGGSGGGSGGGSGGGSGGGSGGGSGGGSGGGSGGGSGGGSGGGSGGGSGGGSGGGSGGGSGGGSGGGS

SEQ ID NO: 2954 - protein, 20 aa, synthetic construct
  VARIANT 2..20: note = Residues may be deleted
GGGGGGGGGGGGGGGGGGGG

SEQ ID NO: 2955 - protein, 36 aa, synthetic construct
  VARIANT 7..36: note = GGSGGD repeats may be deleted
GGSGGDGGSGGDGGSGGDGGSGGDGGSGGDGGSGGD

SEQ ID NO: 2956 - protein, 36 aa, synthetic construct
  VARIANT 7..36: note = GGSGGE repeats may be deleted
GGSGGEGGSGGEGGSGGEGGSGGEGGSGGEGGSGGE

SEQ ID NO: 2957 - protein, 21 aa, synthetic construct
  VARIANT 8..21: note = GGGSGGG repeats may be deleted
GGGSGGGGGGSGGGGGGSGGG

SEQ ID NO: 2958 - protein, 33 aa, synthetic construct
  VARIANT 12..33: note = GGGSGSGGGGS repeats may be deleted
GGGSGSGGGGSGGGSGSGGGGSGGGSGSGGGGS

SEQ ID NO: 2959 - protein, 33 aa, synthetic construct
  VARIANT 12..33: note = GGGGGPGGGGP repeats may be deleted
GGGGGPGGGGPGGGGGPGGGGPGGGGGPGGGGP

SEQ ID NO: 2960 - RNA, 110 nt, synthetic construct; identical to SEQ ID NO: 605
  source 1..110: mol_type = other RNA
  modified_base 1..3: mod_base = OTHER; note = 2'O-Methyl ribonucleotide
  modified_base 1..3: mod_base = OTHER; note = Phosphorothioate linkage
  modified_base 4..17: mod_base = OTHER; note = 2'Fluoro ribonucleotide
  modified_base 105..110: mod_base = OTHER; note = 2'O-Methyl ribonucleotide
  modified_base 105..109: mod_base = OTHER; note = Phosphorothioate linkage

SEQ ID NO: 2961 - RNA, 110 nt, synthetic construct; identical to SEQ ID NO: 605
  source 1..110: mol_type = other RNA
  modified_base 1..3: mod_base = OTHER; note = 2'O-Methyl ribonucleotide
  modified_base 1..3: mod_base = OTHER; note = Phosphorothioate linkage
  modified_base 4..17: mod_base = OTHER; note = 2'Fluoro ribonucleotide
  modified_base 33..36: mod_base = OTHER; note = 2'O-Methyl ribonucleotide
  modified_base 88..91: mod_base = OTHER; note = 2'O-Methyl ribonucleotide
  modified_base 105..110: mod_base = OTHER; note = 2'O-Methyl ribonucleotide
  modified_base 104..109: mod_base = OTHER; note = Phosphorothioate linkage

SEQ ID NO: 2962 - RNA, 110 nt, synthetic construct; identical to SEQ ID NO: 605
  source 1..110: mol_type = other RNA
  modified_base 1..3: mod_base = OTHER; note = 2'O-Methyl ribonucleotide
  modified_base 1..3: mod_base = OTHER; note = Phosphorothioate linkage
  modified_base 5: mod_base = OTHER; note = 2'Fluoro ribonucleotide
  modified_base 7: mod_base = OTHER; note = 2'Fluoro ribonucleotide
  modified_base 9: mod_base = OTHER; note = 2'Fluoro ribonucleotide
  modified_base 11: mod_base = OTHER; note = 2'Fluoro ribonucleotide
  modified_base 13: mod_base = OTHER; note = 2'Fluoro ribonucleotide
  modified_base 15: mod_base = OTHER; note = 2'Fluoro ribonucleotide
  modified_base 33..36: mod_base = OTHER; note = 2'O-Methyl ribonucleotide
  modified_base 55..59: mod_base = OTHER; note = 2'O-Methyl ribonucleotide
  modified_base 88..91: mod_base = OTHER; note = 2'O-Methyl ribonucleotide
  modified_base 105..110: mod_base = OTHER; note = 2'O-Methyl ribonucleotide
  modified_base 104..109: mod_base = OTHER; note = Phosphorothioate linkage

SEQ ID NO: 2963 - RNA, 110 nt, synthetic construct; identical to SEQ ID NO: 605
  source 1..110: mol_type = other RNA
  modified_base 1..3: mod_base = OTHER; note = 2'O-Methyl ribonucleotide
  modified_base 1..3: mod_base = OTHER; note = Phosphorothioate linkage
  modified_base 4: mod_base = OTHER; note = 2'Fluoro ribonucleotide
  modified_base 6: mod_base = OTHER; note = 2'Fluoro ribonucleotide
  modified_base 8: mod_base = OTHER; note = 2'Fluoro ribonucleotide
  modified_base 10: mod_base = OTHER; note = 2'Fluoro ribonucleotide
  modified_base 12: mod_base = OTHER; note = 2'Fluoro ribonucleotide
  modified_base 14: mod_base = OTHER; note = 2'Fluoro ribonucleotide
  modified_base 16: mod_base = OTHER; note = 2'Fluoro ribonucleotide
  modified_base 33..36: mod_base = OTHER; note = 2'O-Methyl ribonucleotide
  modified_base 55..59: mod_base = OTHER; note = 2'O-Methyl ribonucleotide
  modified_base 88..91: mod_base = OTHER; note = 2'O-Methyl ribonucleotide
  modified_base 105..110: mod_base = OTHER; note = 2'O-Methyl ribonucleotide
  modified_base 104..109: mod_base = OTHER; note = Phosphorothioate linkage
